(19) United States
(12) Patent Application Publication
(10) Pub. No.: US 2003/0073144 A1
(43) Pub. Date: Apr. 17, 2003

(54) Compositions and methods for the therapy and diagnosis of pancreatic cancer

(75) Inventors: Darin R. Benson, Seattle, WA (US); Michael D. Kalos, Seattle, WA (US); Michael J. Lodes, Seattle, WA (US); David H. Persing, Redmond, WA (US); William T. Hepler, Seattle, WA (US); Yuqiu Jiang, Kent, WA (US)

Correspondence Address: SEED INTELLECTUAL PROPERTY LAW GROUP PLLC, 701 FIFTH AVE, SUITE 6300, SEATTLE, WA, 98104-7092, US

(73) Assignee: Corixa Corporation, Seattle, WA (US)

(21) Appl. No.: 10/060,036

(22) Filed: Jan. 30, 2002

Related U.S. Application Data
(60) Provisional application No. 60/333,626, filed on Nov. 27, 2001.
(60) Provisional application No. 60/305,484, filed on Jul. 12, 2001.
(60) Provisional application No. 60/265,305, filed on Jan. 30, 2001.
(60) Provisional application No. 60/267,568, filed on Feb. 9, 2001.
(60) Provisional application No. 60/313,999, filed on Aug. 20, 2001.
(60) Provisional application No. 60/291,631, filed on May 16, 2001.
(60) Provisional application No. 60/287,112, filed on Apr. 28, 2001.
(60) Provisional application No. 60/278,651, filed on Mar. 21, 2001.
(60) Provisional application No. 60/265,682, filed on Jan. 31, 2001.

(51) Int. Cl. G01N 33/574; C07H 21/04; C12N 9/00; C12P 21/02; C12N 5/06

(52) U.S. Cl. 435/7.23; 435/69.1; 435/320.1; 435/325; 435/183; 536/23.2

(57) ABSTRACT

Compositions and methods for the therapy and diagnosis of cancer, particularly pancreatic cancer, are disclosed. Illustrative compositions comprise one or more pancreatic tumor polypeptides, immunogenic portions thereof, polynucleotides that encode such polypeptides, antigen presenting cell that expresses such polypeptides, and T cells that are specific for cells expressing such polypeptides. The disclosed compositions are useful, for example, in the diagnosis, prevention and/or treatment of diseases, particularly pancreatic cancer.

### STATEMENT REGARDING SEQUENCE LISTING

[0001] The Sequence Listing associated with this application is provided on CD-ROM in lieu of a paper copy, and is hereby incorporated by reference into the specification. Three CD-ROMs are provided, containing identical copies of the sequence listing: CD-ROM No. I is labeled COPY 1, contains the file 566.app which is 2.9 MB and created on Jan. 30, 2002; CD-ROM No.2 is labeled COPY 2, contains the file 566.app which is 2.9 MB and created on Jan. 30, 2002; CD-ROM No. 3 is labeled CRF, contains the file 566.app which is 2.9 MB and created on Jan. 30, 2002.

### BACKGROUND OF THE INVENTION

[0002] 1. Field of the Invention

[0003] The present invention relates generally to therapy and diagnosis of cancer, such as pancreatic cancer. The invention is more specifically related to polypeptides, comprising at least a portion of a pancreatic tumor protein, and to polynucleotides encoding such polypeptides. Such polypeptides and polynucleotides are useful in pharmaceutical compositions, e.g., vaccines, and other compositions for the diagnosis and treatment of pancreatic cancer.

[0004] 2. Description of the Related Art.

[0005] Cancer is a significant health problem throughout the world. Although advances have been made in detection and therapy of cancer, no vaccine or other universally successful method for prevention and/or treatment is currently available. Current therapies, which are generally based on a combination of chemotherapy or surgery and radiation, continue to prove inadequate in many patients.

[0006] Pancreatic cancer is the fifth leading cause of cancer death in the United States. Current therapies for this common and difficult-to-treat disease include surgery and/or chemotherapy. Although 5-year survival rates after surgical removal of the pancreas and a large portion of the duodenum have improved, the procedure is only used on 9% of patients. Of these, the highest reported 5-year survival rate is in the range of 20%. Patients with advanced pancreatic cancer are treated primarily by chemotherapy. The objective of such therapy is to prolong patient survival. Surgery and irradiation are used as well to relieve pain and reduce organ blockage.

[0007] In spite of considerable research, pancreatic cancer remains difficult to diagnose and treat effectively. Accordingly, there is a need in the art for improved methods for detecting and treating such cancers. The present invention fulfills these needs and further provides other related advantages.

### BRIEF SUMMARY OF THE INVENTION

[0008] In one aspect, the present invention provides polynucleotide compositions comprising a sequence selected from the group consisting of:

[0009] (a) sequences provided in SEQ ID NOs:1-66, 75-152, 174-177, 182, 184-452, and 454-4550;

[0010] (b) complements of the sequences provided in SEQ ID NOs:1-66, 75-152, 174-177, 182, 184-452, and 454-4550;

[0011] (c) sequences consisting of at least 20 contiguous residues of a sequence provided in SEQ ID NOs:1-66, 75-152, 174-177, 182, 184-452, and 454-4550;

[0012] (d) sequences that hybridize to a sequence provided in SEQ ID NOs:1-66, 75-152, 174-177, 182, 184-452, and 454-4550, under moderately stringent conditions;

[0013] (e) sequences having at least 75%, 80%, 85%, 90%, 95%, 96%, 97%, 98% or 99% identity to a sequence of SEQ ID NOs:1-66, 75-152, 174-177, 182, 184-452, and 454-4550;

[0014] (f) sequences having at least 90% identity to a sequence of SEQ ID NOs:1-66, 75-152, 174-177, 182, 184-452, and 454-4550; and

[0015] (g) degenerate variants of a sequence provided in SEQ ID NOs:1-66, 75-152, 174-177, 182, 184-452, and 454-4550.

[0016] In one preferred embodiment, the polynucleotide compositions of the invention are expressed in at least about 20%, more preferably in at least about 30%, and most preferably in at least about 50% of pancreatic tumor samples tested, at a level that is at least about 2-fold, preferably at least about 5-fold, and most preferably at least about 10-fold higher than that for normal tissues.

[0017] The present invention, in another aspect, provides polypeptide compositions comprising an amino acid sequence that is encoded by a polynucleotide sequence described above.

[0018] The present invention further provides polypeptide compositions comprising an amino acid sequence selected from the group consisting of sequences recited in SEQ ID NOs:67-74, 153-173, 178-181, 183,453,4551-4554, 4558-4560.

[0019] In certain preferred embodiments, the polypeptides and/or polynucleotides of the present invention are immunogenic, i.e., they are capable of eliciting an immune response, particularly a humoral and/or cellular immune response, as further described herein.

[0020] The present invention further provides fragments, variants and/or derivatives of the disclosed polypeptide and/or polynucleotide sequences, wherein the fragments, variants and/or derivatives preferably have a level of immunogenic activity of at least about 50%, preferably at least about 70% and more preferably at least about 90% of the level of immunogenic activity of a polypeptide sequence set forth in SEQ ID NOs:67-74, 153-173, 178-181, 183, 453, 4551-4554, 4558-4560 or a polypeptide sequence encoded by a polynucleotide sequence set forth in SEQ ID NOs:1-66, 75-152, 174-177, 182, 184-452, and 454-4550.

[0021] The present invention further provides polynucleotides that encode a polypeptide described above, expression vectors comprising such polynucleotides and host cells transformed or transfected with such expression vectors.

[0022] Within other aspects, the present invention provides pharmaceutical compositions comprising a polypeptide or polynucleotide as described above and a physiologically acceptable carrier.

[0023] Within a related aspect of the present invention, the pharmaceutical compositions, e.g., vaccine compositions, are provided for prophylactic or therapeutic applications. Such compositions generally comprise an immunogenic polypeptide or polynucleotide of the invention and an immunostimulant, such as an adjuvant.

[0024] The present invention further provides pharmaceutical compositions that comprise: (a) an antibody or antigen-binding fragment thereof that specifically binds to a polypeptide of the present invention, or a fragment thereof; and (b) a physiologically acceptable carrier.

[0025] Within further aspects, the present invention provides pharmaceutical compositions comprising: (a) an antigen presenting cell that expresses a polypeptide as described above and (b) a pharmaceutically acceptable carrier or excipient. Illustrative antigen presenting cells include dendritic cells, macrophages, monocytes, fibroblasts and B cells.

[0026] Within related aspects, pharmaceutical compositions are provided that comprise: (a) an antigen presenting cell that expresses a polypeptide as described above and (b) an immunostimulant.

[0027] The present invention further provides, in other aspects, fusion proteins that comprise at least one polypeptide as described above, as well as polynucleotides encoding such fusion proteins, typically in the form of pharmaceutical compositions, e.g., vaccine compositions, comprising a physiologically acceptable carrier and/or an immunostimulant. The fusions proteins may comprise multiple immunogenic polypeptides or portions/variants thereof, as described herein, and may further comprise one or more polypeptide segments for facilitating the expression, purification and/or immunogenicity of the polypeptide(s).

[0028] Within further aspects, the present invention provides methods for stimulating an immune response in a patient, preferably a T cell response in a human patient, comprising administering a pharmaceutical composition described herein. The patient may be afflicted with pancreatic cancer, in which case the methods provide treatment for the disease, or patient considered at risk for such a disease may be treated prophylactically.

[0029] Within further aspects, the present invention provides methods for inhibiting the development of a cancer in a patient, comprising administering to a patient a pharmaceutical composition as recited above. The patient may be afflicted with pancreatic cancer, in which case the methods provide treatment for the disease, or patient considered at risk for such a disease may be treated prophylactically.

[0030] The present invention further provides, within other aspects, methods for removing tumor cells from a biological sample, comprising contacting a biological sample with T cells that specifically react with a polypeptide of the present invention, wherein the step of contacting is performed under conditions and for a time sufficient to permit the removal of cells expressing the protein from the sample.

[0031] Within related aspects, methods are provided for inhibiting the development of a cancer in a patient, comprising administering to a patient a biological sample treated as described above.

[0032] Methods are further provided, within other aspects, for stimulating and/or expanding T cells specific for a polypeptide of the present invention, comprising contacting T cells with one or more of: (i) a polypeptide as described above; (ii) a polynucleotide encoding such a polypeptide; and/or (iii) an antigen presenting cell that expresses such a polypeptide; under conditions and for a time sufficient to permit the stimulation and/or expansion of T cells. Isolated T cell populations comprising T cells prepared as described above are also provided.

[0033] Within further aspects, the present invention provides methods for inhibiting the development of a cancer in a patient, comprising administering to a patient an effective amount of a T cell population as described above.

[0034] The present invention further provides methods for inhibiting the development of a cancer in a patient, comprising the steps of: (a) incubating CD4+ and/or CD8+ T cells isolated from a patient with one or more of: (i) a polypeptide comprising at least an immunogenic portion of polypeptide disclosed herein; (ii) a polynucleotide encoding such a polypeptide; and (iii) an antigen-presenting cell that expressed such a polypeptide; and (b) administering to the patient an effective amount of the proliferated T cells, and thereby inhibiting the development of a cancer in the patient. Proliferated cells may, but need not, be cloned prior to administration to the patient.

[0035] Within further aspects, the present invention provides methods for determining the presence or absence of a cancer, preferably a pancreatic cancer, in a patient comprising: (a) contacting a biological sample obtained from a patient with a binding agent that binds to a polypeptide as recited above; (b) detecting in the sample an amount of polypeptide that binds to the binding agent; and (c) comparing the amount of polypeptide with a predetermined cut-off value, and therefrom determining the presence or absence of a cancer in the patient. Within preferred embodiments, the binding agent is an antibody, more preferably a monoclonal antibody.

[0036] The present invention also provides, within other aspects, methods for monitoring the progression of a cancer in a patient. Such methods comprise the steps of: (a) contacting a biological sample obtained from a patient at a first point in time with a binding agent that binds to a polypeptide as recited above; (b) detecting in the sample an amount of polypeptide that binds to the binding agent; (c) repeating steps (a) and (b) using a biological sample obtained from the patient at a subsequent point in time; and (d) comparing the amount of polypeptide detected in step (c) with the amount detected in step (b) and therefrom monitoring the progression of the cancer in the patient.

[0037] The present invention further provides, within other aspects, methods for determining the presence or absence of a cancer in a patient, comprising the steps of: (a) contacting a biological sample, e.g., tumor sample, serum sample, etc., obtained from a patient with an oligonucleotide that hybridizes to a polynucleotide that encodes a polypeptide of the present invention; (b) detecting in the sample a level of a polynucleotide, preferably mRNA, that hybridizes to the oligonucleotide; and (c) comparing the level of polynucleotide that hybridizes to the oligonucleotide with a predetermined cut-off value, and therefrom determining the presence or absence of a cancer in the patient. Within certain embodiments, the amount of mRNA is detected via polymerase chain reaction using, for example, at least one oligonucleotide primer that hybridizes to a polynucleotide encoding a polypeptide as recited above, or a complement of such a polynucleotide. Within other embodiments, the amount of mRNA is detected using a hybridization technique, employing an oligonucleotide probe that hybridizes to a polynucleotide that encodes a polypeptide as recited above, or a complement of such a polynucleotide.

[0038] In related aspects, methods are provided for monitoring the progression of a cancer in a patient, comprising the steps of: (a) contacting a biological sample obtained from a patient with an oligonucleotide that hybridizes to a polynucleotide that encodes a polypeptide of the present invention; (b) detecting in the sample an amount of a polynucleotide that hybridizes to the oligonucleotide; (c) repeating steps (a) and (b) using a biological sample obtained from the patient at a subsequent point in time; and (d) comparing the amount of polynucleotide detected in step (c) with the amount detected in step (b) and therefrom monitoring the progression of the cancer in the patient.

[0039] Within further aspects, the present invention provides antibodies, such as monoclonal antibodies, that bind to a polypeptide as described above, as well as diagnostic kits comprising such antibodies. Diagnostic kits comprising one or more oligonucleotide probes or primers as described above are also provided.

[0040] These and other aspects of the present invention will become apparent upon reference to the following detailed description. All references disclosed herein are hereby incorporated by reference in their entirety as if each was incorporated individually.

### BRIEF DESCRIPTION OF THE SEQUENCE IDENTIFIERS

[0041] SEQ ID NO:1 is the determined cDNA sequence of clone PANC1-R1, ID NO. 68811.

[0042] SEQ ID NO:2 is the determined cDNA sequence of clone PANC1-R2, ID NO. 68812.

[0043] SEQ ID NO:3 is the determined cDNA sequence of clone PANC1-R3, ID NO. 68813.

[0044] SEQ ID NO:4 is the determined cDNA sequence of clone PANC1-R4, ID NO. 68814.

[0045] SEQ ID NO:5 is the determined cDNA sequence of clone PANC1-R5, ID NO. 68815.

[0046] SEQ ID NO:6 is the determined cDNA sequence of clone PANC1-R6, ID NO. 68816.

[0047] SEQ ID NO:7 is the determined cDNA sequence of clone PANC1-R8, ID NO. 68818.

[0048] SEQ ID NO:8 is the determined cDNA sequence of clone PANC1-R10, ID NO. 68820.

[0049] SEQ ID NO:9 is the determined cDNA sequence of clone PANC1-R11, ID NO. 68821.

[0050] SEQ ID NO:10 is the determined cDNA sequence of clone PANC1-R12, ID NO. 68822.

[0051] SEQ ID NO:11 is the determined cDNA sequence of clone PANC1-R13, ID NO. 68823.

[0052] SEQ ID NO:12 is the determined cDNA sequence of clone PANC1-R14, ID NO. 68824.

[0053] SEQ ID NO:13 is the determined cDNA sequence of clone PANC1-R15, ID NO. 68825.

[0054] SEQ ID NO:14 is the determined cDNA sequence of clone PANC1-R16, ID NO. 68826.

[0055] SEQ ID NO:15 is the determined cDNA sequence of clone PANC1-R17, ID NO. 68827.

[0056] SEQ ID NO:16 is the determined cDNA sequence of clone PANC1-R18, ID NO. 68828.

[0057] SEQ ID NO:17 is the determined cDNA sequence of clone PANC1-R19, ID NO. 68829.

[0058] SEQ ID NO:18 is the determined cDNA sequence of clone PANC1-R20, ID NO. 68830.

[0059] SEQ ID NO:19 is the determined cDNA sequence of clone PANC1-R21, ID NO. 68917.

[0060] SEQ ID NO:20 is the determined cDNA sequence of clone PANC1-R22, ID NO. 68918.

[0061] SEQ ID NO:21 is the determined cDNA sequence of clone PANC1-R23, ID NO. 68919.

[0062] SEQ ID NO:22 is the determined cDNA sequence of clone PANC1-R24, ID NO. 68920.

[0063] SEQ ID NO:23 is the determined cDNA sequence of clone PANC1-R25, ID NO. 68921.

[0064] SEQ ID NO:24 is the determined cDNA sequence of clone PANC1-R27, ID NO. 68923.

[0065] SEQ ID NO:25 is the determined cDNA sequence of clone PANC1-R28, ID NO. 68924.

[0066] SEQ ID NO:26 is the determined cDNA sequence of clone PANC1-R29, ID NO. 68925.

[0067] SEQ ID NO:27 is the determined cDNA sequence of clone PANC1-R30, ID NO. 68926.

[0068] SEQ ID NO:28 is the determined cDNA sequence of clone PANC1-R32, ID NO. 68928.

[0069] SEQ ID NO:29 is the determined cDNA sequence of clone PANC1-R33, ID NO. 68929.

[0070] SEQ ID NO:30 is the determined cDNA sequence of clone PANC1-R34, ID NO. 68930.

[0071] SEQ ID NO:31 is the determined cDNA sequence of clone PANC1-R36, ID NO. 68932.

[0072] SEQ ID NO:32 is the determined cDNA sequence of clone PANC1-R37, ID NO. 68933.

[0073] SEQ ID NO:33 is the determined cDNA sequence of clone PANC1-R39, ID NO. 68935.

[0074] SEQ ID NO:34 is the determined cDNA sequence of clone PANC1-R40, ID NO. 68936.

[0075] SEQ ID NO:35 is the determined cDNA sequence of clone PANC1-R43, ID NO. 69117.

[0076] SEQ ID NO:36 is the determined cDNA sequence of clone PANC1-R44, ID NO. 69118.

[0077] SEQ ID NO:37 is the determined cDNA sequence of clone PANC1-R45, ID NO. 69119.

[0078] SEQ ID NO:38 is the determined cDNA sequence of clone PANC1-R46, ID NO. 69120.

[0079] SEQ ID NO:39 is the determined cDNA sequence of clone PANC1-R47, ID NO. 69126.

[0080] SEQ ID NO:40 is the determined cDNA sequence of clone PANC1-R50, ID NO. 69133.

[0081] SEQ ID NO:41 is the determined cDNA sequence of clone PANC1-R51, ID NO. 69134.

[0082] SEQ ID NO:42 is the determined cDNA sequence of clone PANC1-R52, ID NO. 69135.

[0083] SEQ ID NO:43 is the determined cDNA sequence of clone PANC1-R53, ID NO. 69136.

[0084] SEQ ID NO:44 is the determined cDNA sequence of clone PANC1-R56, ID NO. 69139.

[0085] SEQ ID NO:45 is the determined cDNA sequence of clone PANC1-R59, ID NO. 69142.

[0086] SEQ ID NO:46 is the determined cDNA sequence of clone PANC1-R64, ID NO. 69292.

[0087] SEQ ID NO:47 is the determined cDNA sequence of clone PANC1-R66, ID NO. 69294.

[0088] SEQ ID NO:48 is the determined cDNA sequence of clone PANC1-R67, ID NO. 69295.

[0089] SEQ ID NO:49 is the determined cDNA sequence of clone PANC1-R69, ID NO. 69297.

[0090] SEQ ID NO:50 is the determined cDNA sequence of clone PANC1-R70, ID NO. 69298.

[0091] SEQ ID NO:51 is the determined cDNA sequence of clone PANC1-R71, ID NO. 69299.

[0092] SEQ ID NO:52 is the determined cDNA sequence of clone PANC1-R73, ID NO. 69301.

[0093] SEQ ID NO:53 is the determined cDNA sequence of clone PANC1-R76 A, ID NO. 69304.

[0094] SEQ ID NO:54 is the determined cDNA sequence of clone PANC1-R76 B, ID NO. 69304.

[0095] SEQ ID NO:55 is the determined cDNA sequence of clone PANC1-R78, ID NO. 69306.

[0096] SEQ ID NO:56 is the determined cDNA sequence of clone PANC1-R80, ID NO. 69308.

[0097] SEQ ID NO:57 is the determined cDNA sequence of clone PANC1-R82, ID NO. 69310.

[0098] SEQ ID NO:58 is the determined cDNA sequence of clone PANC1-R83, ID NO. 69311.

[0099] SEQ ID NO:59 is the determined cDNA sequence of clone PANC1-R84, ID NO. 69312.

[0100] SEQ ID NO:60 is the determined cDNA sequence of clone PANC1-R85, ID NO. 69313.

[0101] SEQ ID NO:61 is the determined cDNA sequence of clone PANC1-R86, ID NO. 69314.

[0102] SEQ ID NO:62 is the determined cDNA sequence of clone PANC1-R88, ID NO. 69316.

[0103] SEQ ID NO:63 is the determined cDNA sequence of clone PANC1-R89, ID NO. 69317.

[0104] SEQ ID NO:64 is the determined cDNA sequence of clone PANC1-R90, ID NO. 69318.

[0105] SEQ ID NO:65 is the determined cDNA sequence of clone PANC1-R91, ID NO. 69319.

[0106] SEQ ID NO:66 is the determined cDNA sequence of clone PANC1-R94, ID NO. 69322.

[0107] SEQ ID NO:67 is the predicted polypeptide sequence of clone PANC1-R44, ID NO. 69118.

[0108] SEQ ID NO:68 is the predicted polypeptide sequence of clone PANC1-R47, ID NO. 69126.

[0109] SEQ ID NO:69 is the predicted polypeptide sequence of clone PANC1-R64, ID NO. 69292.

[0110] SEQ ID NO:70 is the predicted polypeptide sequence of clone PANC1-R66, ID NO. 69294.

[0111] SEQ ID NO:71 is the predicted polypeptide sequence of clone PANC1-R76 A, ID NO. 69304.

[0112] SEQ ID NO:72 is the predicted polypeptide sequence of clone PANC1-R76 B, ID NO. 69304.

[0113] SEQ ID NO:73 is the predicted polypeptide sequence of clone PANC1-R85, ID NO. 69313.

[0114] SEQ ID NO:74 is the predicted polypeptide sequence of clone PANC1-R94, ID NO. 69322.

[0115] SEQ ID NO:75 is the determined cDNA sequence of clone 80150.1

[0116] SEQ ID NO:76 is the determined cDNA sequence of clone 80151.1

[0117] SEQ ID NO:77 is the determined cDNA sequence of clone 80152.1

[0118] SEQ ID NO:78 is the determined cDNA sequence of clone 80153.1

[0119] SEQ ID NO:79 is the determined cDNA sequence of clone 80154.1

[0120] SEQ ID NO:80 is the determined cDNA sequence of clone 80155.1

[0121] SEQ ID NO:81 is the determined cDNA sequence of clone 80156.1

[0122] SEQ ID NO:82 is the determined cDNA sequence of clone 80157.1

[0123] SEQ ID NO:83 is the determined cDNA sequence of clone 80158.1

[0124] SEQ ID NO:84 is the determined cDNA sequence of clone 80159.1

[0125] SEQ ID NO:85 is the determined cDNA sequence of clone 80161.1

[0126] SEQ ID NO:86 is the determined cDNA sequence of clone 80162.1

[0127] SEQ ID NO:87 is the determined cDNA sequence of clone 80163.1

[0128] SEQ ID NO:88 is the determined cDNA sequence of clone 80164.1

[0129] SEQ ID NO:89 is the determined cDNA sequence of clone 80165.1

[0130] SEQ ID NO:90 is the determined cDNA sequence of clone 80166.1

[0131] SEQ ID NO:91 is the determined cDNA sequence of clone 80167.1

[0132] SEQ ID NO:92 is the determined cDNA sequence of clone 80168.1

[0133] SEQ ID NO:93 is the determined cDNA sequence of clone 80169.1

[0134] SEQ ID NO:94 is the determined cDNA sequence of clone 80170.1

[0135] SEQ ID NO:95 is the determined cDNA sequence of clone 80171.1

[0136] SEQ ID NO:96 is the determined cDNA sequence of clone 80173.1

[0137] SEQ ID NO:97 is the determined cDNA sequence of clone 80175.1

[0138] SEQ ID NO:98 is the determined cDNA sequence of clone 80176.1

[0139] SEQ ID NO:99 is the determined cDNA sequence of clone 80178.1

[0140] SEQ ID NO:100 is the determined cDNA sequence of clone 80180.1

[0141] SEQ ID NO:101 is the determined cDNA sequence of clone 80181.1

[0142] SEQ ID NO:102 is the determined cDNA sequence of clone 80183.1

[0143] SEQ ID NO:103 is the determined cDNA sequence of clone 80184.1

[0144] SEQ ID NO:104 is the determined cDNA sequence of clone 80185.1

[0145] SEQ ID NO:105 is the determined cDNA sequence of clone 80186.1

[0146] SEQ ID NO:106 is the determined cDNA sequence of clone 80187.1

[0147] SEQ ID NO:107 is the determined cDNA sequence of clone 80188.1

[0148] SEQ ID NO:108 is the determined cDNA sequence of clone 80189.1

[0149] SEQ ID NO:109 is the determined cDNA sequence of clone 80191.1

[0150] SEQ ID NO:110 is the determined cDNA sequence of clone 80192.1

[0151] SEQ ID NO:111 is the determined cDNA sequence of clone 80193.1

[0152] SEQ ID NO:112 is the determined cDNA sequence of clone 80194.1

[0153] SEQ ID NO:113 is the determined cDNA sequence of clone 80195.1

[0154] SEQ ID NO:114 is the determined cDNA sequence of clone 80196.1

[0155] SEQ ID NO:115 is the determined cDNA sequence of clone 80197.1

[0156] SEQ ID NO:116 is the determined cDNA sequence of clone 80198.1

[0157] SEQ ID NO:117 is the determined cDNA sequence of clone 80199.1

[0158] SEQ ID NO:118 is the determined cDNA sequence of clone 80172.2

[0159] SEQ ID NO:119 is the determined cDNA sequence of clone 80174.2

[0160] SEQ ID NO:120 is the determined cDNA sequence of clone 80177.2

[0161] SEQ ID NO:121 is the determined cDNA sequence of clone 80179.2

[0162] SEQ ID NO:122 is the determined cDNA sequence of clone 80190.2

[0163] SEQ ID NO:123 is the determined cDNA sequence of clone 80200.2

[0164] SEQ ID NO:124 is the determined cDNA sequence of clone 80201.2

[0165] SEQ ID NO:125 is the determined cDNA sequence of clone 80203.2

[0166] SEQ ID NO:126 is the determined cDNA sequence of clone 80204.2

[0167] SEQ ID NO:127 is the determined cDNA sequence of clone 80205.2

[0168] SEQ ID NO:128 is the determined cDNA sequence of clone 80207.2

[0169] SEQ ID NO:129 is the determined cDNA sequence of clone 80208.2

[0170] SEQ ID NO:130 is the full-length determined cDNA sequence of clone PIGPC1

[0171] SEQ ID NO:131 is the full-length determined cDNA sequence of clone SERPINE1

[0172] SEQ ID NO:132 is the full-length determined cDNA sequence of clone KRT18

[0173] SEQ ID NO:133 is the full-length determined cDNA sequence of clone RABGGTB

[0174] SEQ ID NO:134 is the full-length determined cDNA sequence of clone hFAT

[0175] SEQ ID NO:135 is the full-length determined cDNA sequence of clone FBL

[0176] SEQ ID NO:136 is the full-length determined cDNA sequence of clone COL1a1

[0177] SEQ ID NO:137 is the full-length determined cDNA sequence of clone pM5

[0178] SEQ ID NO:138 is the full-length determined cDNA sequence of clone PSK-1

[0179] SEQ ID NO:139 is the full-length determined cDNA sequence of clone CD24

[0180] SEQ ID NO:140 is the determined cDNA sequence of clone sim.toHu.G6PD

[0181] SEQ ID NO:141 is the full-length determined cDNA sequence of clone GdX

[0182] SEQ ID NO:142 is the full-length determined cDNA sequence of clone PLS3

[0183] SEQ ID NO:143 is the full-length determined cDNA sequence of clone LISCH7

[0184] SEQ ID NO:144 is the full-length determined cDNA sequence of clone COL18A1

[0185] SEQ ID NO:145 is the full-length determined cDNA sequence of clone TFPI2

[0186] SEQ ID NO:146 is the full-length determined cDNA sequence of clone L6

[0187] SEQ ID NO:147 is the full-length determined cDNA sequence of clone SERF1A

[0188] SEQ ID NO:148 is the full-length determined cDNA sequence of clone SERF1B

[0189] SEQ ID NO:149 is the full-length determined cDNA sequence of clone THBS2

[0190] SEQ ID NO:150 is the full-length determined cDNA sequence of clone SEMA3C

[0191] SEQ ID NO:151 is the full-length determined cDNA sequence of clone CTGF

[0192] SEQ ID NO:152 is the full-length determined cDNA sequence of clone pHL-1

[0193] SEQ ID NO:153 is the full-length predicted amino acid sequence of clone PICPC1

[0194] SEQ ID NO:154 is the full-length predicted amino acid sequence of clone SERPINE1

[0195] SEQ ID NO:155 is the full-length predicted amino acid sequence of clone KRT18

[0196] SEQ ID NO:156 is the full-length predicted amino acid sequence of clone RABGGTB

[0197] SEQ ID NO:157 is the full-length predicted amino acid sequence of clone hFAT

[0198] SEQ ID NO:158 is the full-length predicted amino acid sequence of clone FBL

[0199] SEQ ID NO:159 is the full-length predicted amino acid sequence of clone COL1a1

[0200] SEQ ID NO:160 is the full-length predicted amino acid sequence of clone pM5

[0201] SEQ ID NO:161 is the full-length predicted amino acid sequence of clone PSK-1

[0202] SEQ ID NO:162 is the full-length predicted amino acid sequence of clone CD24

[0203] SEQ ID NO:163 is the full-length predicted amino acid sequence of clone GdX

[0204] SEQ ID NO:164 is the full-length predicted amino acid sequence of clone PLS3

[0205] SEQ ID NO:165 is the full-length predicted amino acid sequence of clone LISCH7

[0206] SEQ ID NO:166 is the full-length predicted amino acid sequence of clone COL18A1

[0207] SEQ ID NO:167 is the full-length predicted amino acid sequence of clone TFPI2

[0208] SEQ ID NO:168 is the full-length predicted amino acid sequence of clone L6

[0209] SEQ ID NO:169 is the full-length predicted amino acid sequence of clone SERF1A

[0210] SEQ ID NO:170 is the full-length predicted amino acid sequence of clone SERF1B

[0211] SEQ ID NO:171 is the full-length predicted amino acid sequence of clone THBS2

[0212] SEQ ID NO:172 is the full-length predicted amino acid sequence of clone SEMA3C

[0213] SEQ ID NO:173 is the full-length predicted amino acid sequence of clone CTGF

[0214] SEQ ID NO:174 is the full-length determined cDNA sequence of clone HECH

[0215] SEQ ID NO:175 is the full-length determined cDNA sequence of clone SCD

[0216] SEQ ID NO:176 is the full-length determined cDNA sequence of clone CHGB

[0217] SEQ ID NO:177 is the full-length determined cDNA sequence of clone FER1L3

[0218] SEQ ID NO:178 is the full-length predicted amino acid sequence of clone HECH

[0219] SEQ ID NO:179 is the full-length predicted amino acid sequence of clone SCD

[0220] SEQ ID NO:180 is the full-length predicted amino acid sequence of clone CHGB

[0221] SEQ ID NO:181 is the full-length predicted amino acid sequence of clone FER1L3

[0222] SEQ ID NO:182 is the full-length determined cDNA sequence of clone MGC15409

[0223] SEQ ID NO:183 is the full-length predicted amino acid sequence of clone MGC15409

[0224] SEQ ID NO:184 is the determined cDNA sequence of clone 71231.1

[0225] SEQ ID NO:185 is the determined cDNA sequence of clone 71232.1

[0226] SEQ ID NO:186 is the determined cDNA sequence of clone 71233.1

[0227] SEQ ID NO:187 is the determined cDNA sequence of clone 71234.1

[0228] SEQ ID NO:188 is the determined cDNA sequence of clone 71235.1

[0229] SEQ ID NO:189 is the determined cDNA sequence of clone 71236.1

[0230] SEQ ID NO:190 is the determined cDNA sequence of clone 71237.1

[0231] SEQ ID NO:191 is the determined cDNA sequence of clone 73408.1

[0232] SEQ ID NO:192 is the determined cDNA sequence of clone 73409.1

[0233] SEQ ID NO:193 is the determined cDNA sequence of clone 73410.1

[0234] SEQ ID NO:194 is the determined cDNA sequence of clone 71238.1

[0235] SEQ ID NO:195 is the determined cDNA sequence of clone 73411.1

[0236] SEQ ID NO:196 is the determined cDNA sequence of clone 71239.1

[0237] SEQ ID NO:197 is the determined cDNA sequence of clone 73412.3

[0238] SEQ ID NO:198 is the determined cDNA sequence of clone 73412.2

[0239] SEQ ID NO:199 is the determined cDNA sequence of clone 71240.1

[0240] SEQ ID NO:200 is the determined cDNA sequence of clone 71241.1

[0241] SEQ ID NO:201 is the determined cDNA sequence of clone 71242.1

[0242] SEQ ID NO:202 is the determined cDNA sequence of clone 73413.2

[0243] SEQ ID NO:203 is the determined cDNA sequence of clone 71243.1

[0244] SEQ ID NO:204 is the determined cDNA sequence of clone 71244.1

[0245] SEQ ID NO:205 is the determined cDNA sequence of clone 71245.1

[0246] SEQ ID NO:206 is the determined cDNA sequence of clone 71246.1

[0247] SEQ ID NO:207 is the determined cDNA sequence of clone 71247.1

[0248] SEQ ID NO:208 is the determined cDNA sequence of clone 71248.1

[0249] SEQ ID NO:209 is the determined cDNA sequence of clone 71249.1

[0250] SEQ ID NO:210 is the determined cDNA sequence of clone 73414.2

[0251] SEQ ID NO:211 is the determined cDNA sequence of clone 71250.1

[0252] SEQ ID NO:212 is the determined cDNA sequence of clone 71251.1

[0253] SEQ ID NO:213 is the determined cDNA sequence of clone 71252.1

[0254] SEQ ID NO:214 is the determined cDNA sequence of clone 71253.1

[0255] SEQ ID NO:215 is the determined cDNA sequence of clone 71254.3

[0256] SEQ ID NO:216 is the determined cDNA sequence of clone 71255.2

[0257] SEQ ID NO:217 is the determined cDNA sequence of clone 71255.3

[0258] SEQ ID NO:218 is the determined cDNA sequence of clone 71256.1

[0259] SEQ ID NO:219 is the determined cDNA sequence of clone 73415.1

[0260] SEQ ID NO:220 is the determined cDNA sequence of clone 71257.1

[0261] SEQ ID NO:221 is the determined cDNA sequence of clone 71258.1

[0262] SEQ ID NO:222 is the determined cDNA sequence of clone 71259.1

[0263] SEQ ID NO:223 is the determined cDNA sequence of clone 73416.1

[0264] SEQ ID NO:224 is the determined cDNA sequence of clone 71260.1

[0265] SEQ ID NO:225 is the determined cDNA sequence of clone 73376.1

[0266] SEQ ID NO:226 is the determined cDNA sequence of clone 73377.1

[0267] SEQ ID NO:227 is the determined cDNA sequence of clone 73378.1

[0268] SEQ ID NO:228 is the determined cDNA sequence of clone 73379.2

[0269] SEQ ID NO:229 is the determined cDNA sequence of clone 73381.3

[0270] SEQ ID NO:230 is the determined cDNA sequence of clone 73381.2

[0271] SEQ ID NO:231 is the determined cDNA sequence of clone 73382.1

[0272] SEQ ID NO:232 is the determined cDNA sequence of clone 73383.2

[0273] SEQ ID NO:233 is the determined cDNA sequence of clone 73383.3

[0274] SEQ ID NO:234 is the determined cDNA sequence of clone 73384.2

[0275] SEQ ID NO:235 is the determined cDNA sequence of clone 73384.3

[0276] SEQ ID NO:236 is the determined cDNA sequence of clone 73385.1

[0277] SEQ ID NO:237 is the determined cDNA sequence of clone 73386.1

[0278] SEQ ID NO:238 is the determined cDNA sequence of clone 73387.1

[0279] SEQ ID NO:239 is the determined cDNA sequence of clone 73388.2

[0280] SEQ ID NO:240 is the determined cDNA sequence of clone 73388.3

[0281] SEQ ID NO:241 is the determined cDNA sequence of clone 73389.2

[0282] SEQ ID NO:242 is the determined cDNA sequence of clone 73389.3

[0283] SEQ ID NO:243 is the determined cDNA sequence of clone 73390.1

[0284] SEQ ID NO:244 is the determined cDNA sequence of clone 73391.2

[0285] SEQ ID NO:245 is the determined cDNA sequence of clone 73417.2

[0286] SEQ ID NO:246 is the determined cDNA sequence of clone 73392.1

[0287] SEQ ID NO:247 is the determined cDNA sequence of clone 73393.3

[0288] SEQ ID NO:248 is the determined cDNA sequence of clone 73418.1

[0289] SEQ ID NO:249 is the determined cDNA sequence of clone 73395.1

[0290] SEQ ID NO:250 is the determined cDNA sequence of clone 73396.1

[0291] SEQ ID NO:251 is the determined cDNA sequence of clone 73397.1

[0292] SEQ ID NO:252 is the determined cDNA sequence of clone 73419.3

[0293] SEQ ID NO:253 is the determined cDNA sequence of clone 73419.2

[0294] SEQ ID NO:254 is the determined cDNA sequence of clone 73398.1

[0295] SEQ ID NO:255 is the determined cDNA sequence of clone 73399.3

[0296] SEQ ID NO:256 is the determined cDNA sequence of clone 73399.2

[0297] SEQ ID NO:257 is the determined cDNA sequence of clone 73400.1

[0298] SEQ ID NO:258 is the determined cDNA sequence of clone 73420.3

[0299] SEQ ID NO:259 is the determined cDNA sequence of clone 73420.2

[0300] SEQ ID NO:260 is the determined cDNA sequence of clone 73401.1

[0301] SEQ ID NO:261 is the determined cDNA sequence of clone 73404.3

[0302] SEQ ID NO:262 is the determined cDNA sequence of clone 73405.1

[0303] SEQ ID NO:263 is the determined cDNA sequence of clone 73407.3

[0304] SEQ ID NO:264 is the determined cDNA sequence of clone 73407.2

[0305] SEQ ID NO:265 is the determined cDNA sequence of clone 72174.1

[0306] SEQ ID NO:266 is the determined cDNA sequence of clone 72175.1

[0307] SEQ ID NO:267 is the determined cDNA sequence of clone 72176.1

[0308] SEQ ID NO:268 is the determined cDNA sequence of clone 72177.1

[0309] SEQ ID NO:269 is the determined cDNA sequence of clone 72178.1

[0310] SEQ ID NO:270 is the determined cDNA sequence of clone 72179.1

[0311] SEQ ID NO:271 is the determined cDNA sequence of clone 73421.3

[0312] SEQ ID NO:272 is the determined cDNA sequence of clone 73421.2

[0313] SEQ ID NO:273 is the determined cDNA sequence of clone 72180.1

[0314] SEQ ID NO:274 is the determined cDNA sequence of clone 72181.1

[0315] SEQ ID NO:275 is the determined cDNA sequence of clone 72182.1

[0316] SEQ ID NO:276 is the determined cDNA sequence of clone 72183.1

[0317] SEQ ID NO:277 is the determined cDNA sequence of clone 72184.1

[0318] SEQ ID NO:278 is the determined cDNA sequence of clone 72185.1

[0319] SEQ ID NO:279 is the determined cDNA sequence of clone 72186.1

[0320] SEQ ID NO:280 is the determined cDNA sequence of clone 72187.1

[0321] SEQ ID NO:281 is the determined cDNA sequence of clone 72188.1

[0322] SEQ ID NO:282 is the determined cDNA sequence of clone 72189.1

[0323] SEQ ID NO:283 is the determined cDNA sequence of clone 72190.1

[0324] SEQ ID NO:284 is the determined cDNA sequence of clone 72191.1

[0325] SEQ ID NO:285 is the determined cDNA sequence of clone 72192.1

[0326] SEQ ID NO:286 is the determined cDNA sequence of clone 72193.1

[0327] SEQ ID NO:287 is the determined cDNA sequence of clone 72194.1

[0328] SEQ ID NO:288 is the determined cDNA sequence of clone 72195.1

[0329] SEQ ID NO:289 is the determined cDNA sequence of clone 72196.1

[0330] SEQ ID NO:290 is the determined cDNA sequence of clone 72197.1

[0331] SEQ ID NO:291 is the determined cDNA sequence of clone 72198.1

[0332] SEQ ID NO:292 is the determined cDNA sequence of clone 72199.1

[0333] SEQ ID NO:293 is the determined cDNA sequence of clone 72200.1

[0334] SEQ ID NO:294 is the determined cDNA sequence of clone 72201.1

[0335] SEQ ID NO:295 is the determined cDNA sequence of clone 72202.1

[0336] SEQ ID NO:296 is the determined cDNA sequence of clone 72203.1

[0337] SEQ ID NO:297 is the determined cDNA sequence of clone 72204.1

[0338] SEQ ID NO:298 is the determined cDNA sequence of clone 72205.1

[0339] SEQ ID NO:299 is the determined cDNA sequence of clone 72206.3

[0340] SEQ ID NO:300 is the determined cDNA sequence of clone 72206.2

[0341] SEQ ID NO:301 is the determined cDNA sequence of clone 73422.1

[0342] SEQ ID NO:302 is the determined cDNA sequence of clone 73423.1

[0343] SEQ ID NO:303 is the determined cDNA sequence of clone 73424.1

[0344] SEQ ID NO:304 is the determined cDNA sequence of clone 73425.3

[0345] SEQ ID NO:305 is the determined cDNA sequence of clone 73425.2

[0346] SEQ ID NO:306 is the determined cDNA sequence of clone 74597.2

[0347] SEQ ID NO:307 is the determined cDNA sequence of clone 73426.3

[0348] SEQ ID NO:308 is the determined cDNA sequence of clone 73426.2

[0349] SEQ ID NO:309 is the determined cDNA sequence of clone 73427.3

[0350] SEQ ID NO:310 is the determined cDNA sequence of clone 73427.2

[0351] SEQ ID NO:311 is the determined cDNA sequence of clone 73428.3

[0352] SEQ ID NO:312 is the determined cDNA sequence of clone 73429.3

[0353] SEQ ID NO:313 is the determined cDNA sequence of clone 74598.1

[0354] SEQ ID NO:314 is the determined cDNA sequence of clone 74598.2

[0355] SEQ ID NO:315 is the determined cDNA sequence of clone 74599.2

[0356] SEQ ID NO:316 is the determined cDNA sequence of clone 73430.3

[0357] SEQ ID NO:317 is the determined cDNA sequence of clone 74600.1

[0358] SEQ ID NO:318 is the determined cDNA sequence of clone 74600.2

[0359] SEQ ID NO:319 is the determined cDNA sequence of clone 74601.1

[0360] SEQ ID NO:320 is the determined cDNA sequence of clone 74602.2

[0361] SEQ ID NO:321 is the determined cDNA sequence of clone 73437.2

[0362] SEQ ID NO:322 is the determined cDNA sequence of clone 73437.3

[0363] SEQ ID NO:323 is the determined cDNA sequence of clone 73438.2

[0364] SEQ ID NO:324 is the determined cDNA sequence of clone 73438.3

[0365] SEQ ID NO:325 is the determined cDNA sequence of clone 73439.2

[0366] SEQ ID NO:326 is the determined cDNA sequence of clone 73439.3

[0367] SEQ ID NO:327 is the determined cDNA sequence of clone 73440.2

[0368] SEQ ID NO:328 is the determined cDNA sequence of clone 73440.3

[0369] SEQ ID NO:329 is the determined cDNA sequence of clone 73441.3

[0370] SEQ ID NO:330 is the determined cDNA sequence of clone 73442.2

[0371] SEQ ID NO:331 is the determined cDNA sequence of clone 73442.3

[0372] SEQ ID NO:332 is the determined cDNA sequence of clone 73443.2

[0373] SEQ ID NO:333 is the determined cDNA sequence of clone 73443.3

[0374] SEQ ID NO:334 is the determined cDNA sequence of clone 73444.2

[0375] SEQ ID NO:335 is the determined cDNA sequence of clone 73444.3

[0376] SEQ ID NO:336 is the determined cDNA sequence of clone 74602.1

[0377] SEQ ID NO:337 is the determined cDNA sequence of clone 73445.1

[0378] SEQ ID NO:338 is the determined cDNA sequence of clone 73456.1

[0379] SEQ ID NO:339 is the determined cDNA sequence of clone 73585.3

[0380] SEQ ID NO:340 is the determined cDNA sequence of clone 73586.2

[0381] SEQ ID NO:341 is the determined cDNA sequence of clone 73586.3

[0382] SEQ ID NO:342 is the determined cDNA sequence of clone 73587.2

[0383] SEQ ID NO:343 is the determined cDNA sequence of clone 73587.3

[0384] SEQ ID NO:344 is the determined cDNA sequence of clone 73457.2

[0385] SEQ ID NO:345 is the determined cDNA sequence of clone 73457.3

[0386] SEQ ID NO:346 is the determined cDNA sequence of clone 74603.1

[0387] SEQ ID NO:347 is the determined cDNA sequence of clone 74603.2

[0388] SEQ ID NO:348 is the determined cDNA sequence of clone 73458.1

[0389] SEQ ID NO:349 is the determined cDNA sequence of clone 73459.2

[0390] SEQ ID NO:350 is the determined cDNA sequence of clone 73459.3

[0391] SEQ ID NO:351 is the determined cDNA sequence of clone 73460.2

[0392] SEQ ID NO:352 is the determined cDNA sequence of clone 73460.3

[0393] SEQ ID NO:353 is the determined cDNA sequence of clone 73461.1

[0394] SEQ ID NO:354 is the determined cDNA sequence of clone 74604.1

[0395] SEQ ID NO:355 is the determined cDNA sequence of clone 74604.2

[0396] SEQ ID NO:356 is the determined cDNA sequence of clone 74605.1

[0397] SEQ ID NO:357 is the determined cDNA sequence of clone 74605.2

[0398] SEQ ID NO:358 is the determined cDNA sequence of clone 74606.1

[0399] SEQ ID NO:359 is the determined cDNA sequence of clone 74606.2

[0400] SEQ ID NO:360 is the determined cDNA sequence of clone 74607.1

[0401] SEQ ID NO:361 is the determined cDNA sequence of clone 74607.2

[0402] SEQ ID NO:362 is the determined cDNA sequence of clone 74608.1

[0403] SEQ ID NO:363 is the determined cDNA sequence of clone 74608.2

[0404] SEQ ID NO:364 is the determined cDNA sequence of clone 74610.2

[0405] SEQ ID NO:365 is the determined cDNA sequence of clone 74611.1

[0406] SEQ ID NO:366 is the determined cDNA sequence of clone 74613.1

[0407] SEQ ID NO:367 is the determined cDNA sequence of clone 74613.2

[0408] SEQ ID NO:368 is the determined cDNA sequence of clone 74614.1

[0409] SEQ ID NO:369 is the determined cDNA sequence of clone 74614.2

[0410] SEQ ID NO:370 is the determined cDNA sequence of clone 74640.2

[0411] SEQ ID NO:371 is the determined cDNA sequence of clone 74640.1

[0412] SEQ ID NO:372 is the determined cDNA sequence of clone 74615.2

[0413] SEQ ID NO:373 is the determined cDNA sequence of clone 74615.1

[0414] SEQ ID NO:374 is the determined cDNA sequence of clone 74616.2

[0415] SEQ ID NO:375 is the determined cDNA sequence of clone 74616.1

[0416] SEQ ID NO:376 is the determined cDNA sequence of clone 74617.2

[0417] SEQ ID NO:377 is the determined cDNA sequence of clone 77101.1

[0418] SEQ ID NO:378 is the determined cDNA sequence of clone 77102.1

[0419] SEQ ID NO:379 is the determined cDNA sequence of clone 77104.1

[0420] SEQ ID NO:380 is the determined cDNA sequence of clone 74618.1

[0421] SEQ ID NO:381 is the determined cDNA sequence of clone 74618.2

[0422] SEQ ID NO:382 is the determined cDNA sequence of clone 74619.2

[0423] SEQ ID NO:383 is the determined cDNA sequence of clone 74620.1

[0424] SEQ ID NO:384 is the determined cDNA sequence of clone 74620.2

[0425] SEQ ID NO:385 is the determined cDNA sequence of clone 74621.1

[0426] SEQ ID NO:386 is the determined cDNA sequence of clone 74621.2

[0427] SEQ ID NO:387 is the determined cDNA sequence of clone 74623.1

[0428] SEQ ID NO:388 is the determined cDNA sequence of clone 74623.2

[0429] SEQ ID NO:389 is the determined cDNA sequence of clone 74624.1

[0430] SEQ ID NO:390 is the determined cDNA sequence of clone 74624.2

[0431] SEQ ID NO:391 is the determined cDNA sequence of clone 74625.1

[0432] SEQ ID NO:392 is the determined cDNA sequence of clone 74625.2

[0433] SEQ ID NO:393 is the determined cDNA sequence of clone 74631.2

[0434] SEQ ID NO:394 is the determined cDNA sequence of clone 74632.1

[0435] SEQ ID NO:395 is the determined cDNA sequence of clone 74632.2

[0436] SEQ ID NO:396 is the determined cDNA sequence of clone 77105.1

[0437] SEQ ID NO:397 is the determined cDNA sequence of clone 77108.1

[0438] SEQ ID NO:398 is the determined cDNA sequence of clone 77109.1

[0439] SEQ ID NO:399 is the determined cDNA sequence of clone 77114.1

[0440] SEQ ID NO:400 is the determined cDNA sequence of clone 77118.1

[0441] SEQ ID NO:401 is the determined cDNA sequence of clone 77120.1

[0442] SEQ ID NO:402 is the determined cDNA sequence of clone 77122.1

[0443] SEQ ID NO:403 is the determined cDNA sequence of clone 77123.1

[0444] SEQ ID NO:404 is the determined cDNA sequence of clone 77125.1

[0445] SEQ ID NO:405 is the determined cDNA sequence of clone 77127.1

[0446] SEQ ID NO:406 is the determined cDNA sequence of clone 77129.1

[0447] SEQ ID NO:407 is the determined cDNA sequence of clone 77130.1

[0448] SEQ ID NO:408 is the determined cDNA sequence of clone 77132.1

[0449] SEQ ID NO:409 is the determined cDNA sequence of clone 77134.1

[0450] SEQ ID NO:410 is the determined cDNA sequence of clone 77135.1

[0451] SEQ ID NO:411 is the determined cDNA sequence of clone 77136.1

[0452] SEQ ID NO:412 is the determined cDNA sequence of clone 77139.1

[0453] SEQ ID NO:413 is the determined cDNA sequence of clone 77140.1

[0454] SEQ ID NO:414 is the determined cDNA sequence of clone 77141.1

[0455] SEQ ID NO:415 is the determined cDNA sequence of clone 77144.1

[0456] SEQ ID NO:416 is the determined cDNA sequence of clone 77146.1

[0457] SEQ ID NO:417 is the determined cDNA sequence of clone 77149.1

[0458] SEQ ID NO:418 is the determined cDNA sequence of clone 77474.1

[0459] SEQ ID NO:419 is the determined cDNA sequence of clone 77153.1

[0460] SEQ ID NO:420 is the determined cDNA sequence of clone 77479.1

[0461] SEQ ID NO:421 is the determined cDNA sequence of clone 77154.1

[0462] SEQ ID NO:422 is the determined cDNA sequence of clone 77155.1

[0463] SEQ ID NO:423 is the determined cDNA sequence of clone 77157.1

[0464] SEQ ID NO:424 is the determined cDNA sequence of clone 77480.1

[0465] SEQ ID NO:425 is the determined cDNA sequence of clone 77485.1

[0466] SEQ ID NO:426 is the determined cDNA sequence of clone 77487.1

[0467] SEQ ID NO:427 is the determined cDNA sequence of clone 77488.1

[0468] SEQ ID NO:428 is the determined cDNA sequence of clone 77490.1

[0469] SEQ ID NO:429 is the determined cDNA sequence of clone 77494.1

[0470] SEQ ID NO:430 is the determined cDNA sequence of clone 77495.1

[0471] SEQ ID NO:431 is the determined cDNA sequence of clone 77499.1

[0472] SEQ ID NO:432 is the determined cDNA sequence of clone 77500.1

[0473] SEQ ID NO:433 is the determined cDNA sequence of clone 77160.1

[0474] SEQ ID NO:434 is the determined cDNA sequence of clone 77504.1

[0475] SEQ ID NO:435 is the determined cDNA sequence of clone 77506.1

[0476] SEQ ID NO:436 is the determined cDNA sequence of clone 77507.1

[0477] SEQ ID NO:437 is the determined cDNA sequence of clone 77508.1

[0478] SEQ ID NO:438 is the determined cDNA sequence of clone 77509.1

[0479] SEQ ID NO:439 is the determined cDNA sequence of clone 77162.1

[0480] SEQ ID NO:440 is the determined cDNA sequence of clone 77163.1

[0481] SEQ ID NO:441 is the determined cDNA sequence of clone 77165.1

[0482] SEQ ID NO:442 is the determined cDNA sequence of clone 77167.1

[0483] SEQ ID NO:443 is the determined cDNA sequence of clone 77169.1

[0484] SEQ ID NO:444 is the determined cDNA sequence of clone 77171.1

[0485] SEQ ID NO:445 is the determined cDNA sequence of clone 77172.1

[0486] SEQ ID NO:446 is the determined cDNA sequence of clone 77173.1

[0487] SEQ ID NO:447 is the determined cDNA sequence of clone 77175.1

[0488] SEQ ID NO:448 is the determined cDNA sequence of clone 77176.1

[0489] SEQ ID NO:449 is the determined cDNA sequence of clone 77178.1

[0490] SEQ ID NO:450 is the determined cDNA sequence of clone 77180.1

[0491] SEQ ID NO:451 is the determined cDNA sequence of clone 77510.1

[0492] SEQ ID NO:452 is the full-length determined cDNA sequence for coxIII

[0493] SEQ ID NO:453 is the full-length predicted amino acid sequence of coxIII

[0494] SEQ ID NO:454 is the determined full-length cDNA sequence of clone 80186 (also referred to as Pn80E), extending the sequence set forth in SEQ ID NO:105

[0495] SEQ ID NO:455 is the full-length cDNA sequence of Pn81E.

[0496] SEQ ID NO:456 is the determined cDNA sequence of clone PaSLBH2c1

[0497] SEQ ID NO:457 is the determined cDNA sequence of clone PaSLBH2c2

[0498] SEQ ID NO:458 is the determined cDNA sequence of clone PaSLBH2c3

[0499] SEQ ID NO:459 is the determined cDNA sequence of clone PaSLBH2c4

[0500] SEQ ID NO:460 is the determined cDNA sequence of clone PaSLBH2c5

[0501] SEQ ID NO:461 is the determined cDNA sequence of clone PaSLBH2c7

[0502] SEQ ID NO:462 is the determined cDNA sequence of clone PaSLBH2c8

[0503] SEQ ID NO:463 is the determined cDNA sequence of clone PaSLBH2c9

[0504] SEQ ID NO:464 is the determined cDNA sequence of clone PaSLBH2c10

[0505] SEQ ID NO:465 is the determined cDNA sequence of clone PaSLBH2c11

[0506] SEQ ID NO:466 is the determined cDNA sequence of clone PaSLBH2c12

[0507] SEQ ID NO:467 is the determined cDNA sequence of clone PaSLBH2c13

[0508] SEQ ID NO:468 is the determined cDNA sequence of clone PaSLBH2c14

[0509] SEQ ID NO:469 is the determined cDNA sequence of clone PaSLBH2c15

[0510] SEQ ID NO:470 is the determined cDNA sequence of clone PaSLBH2c16

[0511] SEQ ID NO:471 is the determined cDNA sequence of clone PaSLBH2c17

[0512] SEQ ID NO:472 is the determined cDNA sequence of clone PaSLBH2c18

[0513] SEQ ID NO:473 is the determined cDNA sequence of clone PaSLBH2c19

[0514] SEQ ID NO:474 is the determined cDNA sequence of clone PaSLBH2c20

[0515] SEQ ID NO:475 is the determined cDNA sequence of clone PaSLBH2c21

[0516] SEQ ID NO:476 is the determined cDNA sequence of clone PaSLBH2c22

[0517] SEQ ID NO:477 is the determined cDNA sequence of clone PaSLBH2c23

[0518] SEQ ID NO:478 is the determined cDNA sequence of clone PaSLBH2c24

[0519] SEQ ID NO:479 is the determined cDNA sequence of clone PaSLBH2c25

[0520] SEQ ID NO:480 is the determined cDNA sequence of clone PaSLBH2c26

[0521] SEQ ID NO:481 is the determined cDNA sequence of clone PaSLBH2c27

[0522] SEQ ID NO:482 is the determined cDNA sequence of clone PaSLBH2c28

[0523] SEQ ID NO:483 is the determined cDNA sequence of clone PaSLBH2c29

[0524] SEQ ID NO:484 is the determined cDNA sequence of clone PaSLBH2c30

[0525] SEQ ID NO:485 is the determined cDNA sequence of clone PaSLBH2c31

[0526] SEQ ID NO:486 is the determined cDNA sequence of clone PaSLBH2c32

[0527] SEQ ID NO:487 is the determined cDNA sequence of clone PaSLBH2c33

[0528] SEQ ID NO:488 is the determined cDNA sequence of clone PaSLBH2c34

[0529] SEQ ID NO:489 is the determined cDNA sequence of clone PaSLBH2c35

[0530] SEQ ID NO:490 is the determined cDNA sequence of clone PaSLBH2c36

[0531] SEQ ID NO:491 is the determined cDNA sequence of clone PaSLBH2c37

[0532] SEQ ID NO:492 is the determined cDNA sequence of clone PaSLBH2c38

[0533] SEQ ID NO:493 is the determined cDNA sequence of clone PaSLBH2c39

[0534] SEQ ID NO:494 is the determined cDNA sequence of clone PASLBH2bc1

[0535] SEQ ID NO:495 is the determined cDNA sequence of clone PASLBH2bc2

[0536] SEQ ID NO:496 is the determined cDNA sequence of clone PASLBH2bc3

[0537] SEQ ID NO:497 is the determined cDNA sequence of clone PASLBH2bc4

[0538] SEQ ID NO:498 is the determined cDNA sequence of clone PASLBH2bc5

[0539] SEQ ID NO:499 is the determined cDNA sequence of clone PASLBH2bc6

[0540] SEQ ID NO:500 is the determined cDNA sequence of clone PASLBH2bc7

[0541] SEQ ID NO:501 is the determined cDNA sequence of clone PASLBH2bc8

[0542] SEQ ID NO:502 is the determined cDNA sequence of clone PASLBH2bc10

[0543] SEQ ID NO:503 is the determined cDNA sequence of clone PASLBH2bc11

[0544] SEQ ID NO:504 is the determined cDNA sequence of clone PASLBH2bc12

[0545] SEQ ID NO:505 is the determined cDNA sequence of clone PASLBH2bc13

[0546] SEQ ID NO:506 is the determined cDNA sequence of clone PASLBH2bc14

[0547] SEQ ID NO:507 is the determined cDNA sequence of clone PASLBH2bc15

[0548] SEQ ID NO:508 is the determined cDNA sequence of clone PASLBH2bc16

[0549] SEQ ID NO:509 is the determined cDNA sequence of clone PASLBH2bc17

[0550] SEQ ID NO:510 is the determined cDNA sequence of clone PASLBH2bc18

[0551] SEQ ID NO:511 is the determined cDNA sequence of clone PASLBH2bc19

[0552] SEQ ID NO:512 is the determined cDNA sequence of clone PASLBH2bc20

[0553] SEQ ID NO:513 is the determined cDNA sequence of clone PASLBH2bc21

[0554] SEQ ID NO:514 is the determined cDNA sequence of clone PASLBH2bc22

[0555] SEQ ID NO:515 is the determined cDNA sequence of clone PASLBH2bc23

[0556] SEQ ID NO:516 is the determined cDNA sequence of clone PASLBH2bc24

[0557] SEQ ID NO:517 is the determined cDNA sequence of clone PASLBH2bc25

[0558] SEQ ID NO:518 is the determined cDNA sequence of clone PASLBH2bc26

[0559] SEQ ID NO:519 is the determined cDNA sequence of clone PASLBH2bc27

[0560] SEQ ID NO:520 is the determined cDNA sequence of clone PASLBH2bc28

[0561] SEQ ID NO:521 is the determined cDNA sequence of clone PASLBH2bc29

[0562] SEQ ID NO:522 is the determined cDNA sequence of clone PASLBH2bc30

[0563] SEQ ID NO:523 is the determined cDNA sequence of clone PASLBH2bc31

[0564] SEQ ID NO:524 is the determined cDNA sequence of clone PASLBH2bc32

[0565] SEQ ID NO:525 is the determined cDNA sequence of clone PASLBH2bc33

[0566] SEQ ID NO:526 is the determined cDNA sequence of clone PASLBH2bc35

[0567] SEQ ID NO:527 is the determined cDNA sequence of clone PASLBH2bc36

[0568] SEQ ID NO:528 is the determined cDNA sequence of clone PASLBH2bc37

[0569] SEQ ID NO:529 is the determined cDNA sequence of clone 61219685

[0570] SEQ ID NO:530 is the determined cDNA sequence of clone 61219686

[0571] SEQ ID NO:531 is the determined cDNA sequence of clone 61219688

[0572] SEQ ID NO:532 is the determined cDNA sequence of clone 61219689

[0573] SEQ ID NO:533 is the determined cDNA sequence of clone 61219690

[0574] SEQ ID NO:534 is the determined cDNA sequence of clone 61219691

[0575] SEQ ID NO:535 is the determined cDNA sequence of clone 61219692

[0576] SEQ ID NO:536 is the determined cDNA sequence of clone 61219693

[0577] SEQ ID NO:537 is the determined cDNA sequence of clone 61219694

[0578] SEQ ID NO:538 is the determined cDNA sequence of clone 61219695

[0579] SEQ ID NO:539 is the determined cDNA sequence of clone 61219696

[0580] SEQ ID NO:540 is the determined cDNA sequence of clone 61219697

[0581] SEQ ID NO:541 is the determined cDNA sequence of clone 61219698

[0582] SEQ ID NO:542 is the determined cDNA sequence of clone 61219699

[0583] SEQ ID NO:543 is the determined cDNA sequence of clone 61219700

[0584] SEQ ID NO:544 is the determined cDNA sequence of clone 61219701

[0585] SEQ ID NO:545 is the determined cDNA sequence of clone 61219704

[0586] SEQ ID NO:546 is the determined cDNA sequence of clone 61219705

[0587] SEQ ID NO:547 is the determined cDNA sequence of clone 61219706

[0588] SEQ ID NO:548 is the determined cDNA sequence of clone 61219708

[0589] SEQ ID NO:549 is the determined cDNA sequence of clone 61219709

[0590] SEQ ID NO:550 is the determined cDNA sequence of clone 61219710

[0591] SEQ ID NO:551 is the determined cDNA sequence of clone 61219711

[0592] SEQ ID NO:552 is the determined cDNA sequence of clone 61219712

[0593] SEQ ID NO:553 is the determined cDNA sequence of clone 61219713

[0594] SEQ ID NO:554 is the determined cDNA sequence of clone 61219714

[0595] SEQ ID NO:555 is the determined cDNA sequence of clone 61219715

[0596] SEQ ID NO:556 is the determined cDNA sequence of clone 61219716

[0597] SEQ ID NO:557 is the determined cDNA sequence of clone 61219717

[0598] SEQ ID NO:558 is the determined cDNA sequence of clone 61219718

[0599] SEQ ID NO:559 is the determined cDNA sequence of clone 61219720

[0600] SEQ ID NO:560 is the determined cDNA sequence of clone 61219721

[0601] SEQ ID NO:561 is the determined cDNA sequence of clone 61219723

[0602] SEQ ID NO:562 is the determined cDNA sequence of clone 61219725

[0603] SEQ ID NO:563 is the determined cDNA sequence of clone 61219726

[0604] SEQ ID NO:564 is the determined cDNA sequence of clone 61219727

[0605] SEQ ID NO:565 is the determined cDNA sequence of clone 61219728

[0606] SEQ ID NO:566 is the determined cDNA sequence of clone 61219729

[0607] SEQ ID NO:567 is the determined cDNA sequence of clone 61219730

[0608] SEQ ID NO:568 is the determined cDNA sequence of clone 61219731

[0609] SEQ ID NO:569 is the determined cDNA sequence of clone 61219732

[0610] SEQ ID NO:570 is the determined cDNA sequence of clone 61219733

[0611] SEQ ID NO:571 is the determined cDNA sequence of clone 61219735

[0612] SEQ ID NO:572 is the determined cDNA sequence of clone 61219736

[0613] SEQ ID NO:573 is the determined cDNA sequence of clone 61219738

[0614] SEQ ID NO:574 is the determined cDNA sequence of clone 61219739

[0615] SEQ ID NO:575 is the determined cDNA sequence of clone 61219740

[0616] SEQ ID NO:576 is the determined cDNA sequence of clone 61219741

[0617] SEQ ID NO:577 is the determined cDNA sequence of clone 61219742

[0618] SEQ ID NO:578 is the determined cDNA sequence of clone 61219744

[0619] SEQ ID NO:579 is the determined cDNA sequence of clone 61219745

[0620] SEQ ID NO:580 is the determined cDNA sequence of clone 61219747

[0621] SEQ ID NO:581 is the determined cDNA sequence of clone 61219748

[0622] SEQ ID NO:582 is the determined cDNA sequence of clone 61219749

[0623] SEQ ID NO:583 is the determined cDNA sequence of clone 61219750

[0624] SEQ ID NO:584 is the determined cDNA sequence of clone 61219752

[0625] SEQ ID NO:585 is the determined cDNA sequence of clone 61219753

[0626] SEQ ID NO:586 is the determined cDNA sequence of clone 61219755

[0627] SEQ ID NO:587 is the determined cDNA sequence of clone 61219756

[0628] SEQ ID NO:588 is the determined cDNA sequence of clone 61219757

[0629] SEQ ID NO:589 is the determined cDNA sequence of clone 61219759

[0630] SEQ ID NO:590 is the determined cDNA sequence of clone 61219761

[0631] SEQ ID NO:591 is the determined cDNA sequence of clone 61219762

[0632] SEQ ID NO:592 is the determined cDNA sequence of clone 61219763

[0633] SEQ ID NO:593 is the determined cDNA sequence of clone 61219764

[0634] SEQ ID NO:594 is the determined cDNA sequence of clone 61219765

[0635] SEQ ID NO:595 is the determined cDNA sequence of clone 61219766

[0636] SEQ ID NO:596 is the determined cDNA sequence of clone 61219767

[0637] SEQ ID NO:597 is the determined cDNA sequence of clone 61219768

[0638] SEQ ID NO:598 is the determined cDNA sequence of clone 61219771

[0639] SEQ ID NO:599 is the determined cDNA sequence of clone 61219772

[0640] SEQ ID NO:600 is the determined cDNA sequence of clone 61219773

[0641] SEQ ID NO:601 is the determined cDNA sequence of clone 61219774

[0642] SEQ ID NO:602 is the determined cDNA sequence of clone 61219775

[0643] SEQ ID NO:603 is the determined cDNA sequence of clone 61220056

[0644] SEQ ID NO:604 is the determined cDNA sequence of clone 61220058

[0645] SEQ ID NO:605 is the determined cDNA sequence of clone 61220059

[0646] SEQ ID NO:606 is the determined cDNA sequence of clone 61220060

[0647] SEQ ID NO:607 is the determined cDNA sequence of clone 61220062

[0648] SEQ ID NO:608 is the determined cDNA sequence of clone 61220064

[0649] SEQ ID NO:609 is the determined cDNA sequence of clone 61220065

[0650] SEQ ID NO:610 is the determined cDNA sequence of clone 61220066

[0651] SEQ ID NO:611 is the determined cDNA sequence of clone 61220067

[0652] SEQ ID NO:612 is the determined cDNA sequence of clone 61220068

[0653] SEQ ID NO:613 is the determined cDNA sequence of clone 61220069

[0654] SEQ ID NO:614 is the determined cDNA sequence of clone 61220070

[0655] SEQ ID NO:615 is the determined cDNA sequence of clone 61220071

[0656] SEQ ID NO:616 is the determined cDNA sequence of clone 61220072

[0657] SEQ ID NO:617 is the determined cDNA sequence of clone 61220073

[0658] SEQ ID NO:618 is the determined cDNA sequence of clone 61220074

[0659] SEQ ID NO:619 is the determined cDNA sequence of clone 61220075

[0660] SEQ ID NO:620 is the determined cDNA sequence of clone 61220076

[0661] SEQ ID NO:621 is the determined cDNA sequence of clone 61220077

[0662] SEQ ID NO:622 is the determined cDNA sequence of clone 61220078

[0663] SEQ ID NO:623 is the determined cDNA sequence of clone 61220080

[0664] SEQ ID NO:624 is the determined cDNA sequence of clone 61220081

[0665] SEQ ID NO:625 is the determined cDNA sequence of clone 61220082

[0666] SEQ ID NO:626 is the determined cDNA sequence of clone 61220083

[0667] SEQ ID NO:627 is the determined cDNA sequence of clone 61220084

[0668] SEQ ID NO:628 is the determined cDNA sequence of clone 61220085

[0669] SEQ ID NO:629 is the determined cDNA sequence of clone 61220086

[0670] SEQ ID NO:630 is the determined cDNA sequence of clone 61220087

[0671] SEQ ID NO:631 is the determined cDNA sequence of clone 61220088

[0672] SEQ ID NO:632 is the determined cDNA sequence of clone 61220089

[0673] SEQ ID NO:633 is the determined cDNA sequence of clone 61220090

[0674] SEQ ID NO:634 is the determined cDNA sequence of clone 61220091

[0675] SEQ ID NO:635 is the determined cDNA sequence of clone 61220093

[0676] SEQ ID NO:636 is the determined cDNA sequence of clone 61220094

[0677] SEQ ID NO:637 is the determined cDNA sequence of clone 61220095

[0678] SEQ ID NO:638 is the determined cDNA sequence of clone 61220096

[0679] SEQ ID NO:639 is the determined cDNA sequence of clone 61220097

[0680] SEQ ID NO:640 is the determined cDNA sequence of clone 61220099

[0681] SEQ ID NO:641 is the determined cDNA sequence of clone 61220100

[0682] SEQ ID NO:642 is the determined cDNA sequence of clone 61220101

[0683] SEQ ID NO:643 is the determined cDNA sequence of clone 61220104

[0684] SEQ ID NO:644 is the determined cDNA sequence of clone 61220105

[0685] SEQ ID NO:645 is the determined cDNA sequence of clone 61220106

[0686] SEQ ID NO:646 is the determined cDNA sequence of clone 61220107

[0687] SEQ ID NO:647 is the determined cDNA sequence of clone 61220108

[0688] SEQ ID NO:648 is the determined cDNA sequence of clone 61220109

[0689] SEQ ID NO:649 is the determined cDNA sequence of clone 61220110

[0690] SEQ ID NO:650 is the determined cDNA sequence of clone 61220112

[0691] SEQ ID NO:651 is the determined cDNA sequence of clone 61220113

[0692] SEQ ID NO:652 is the determined cDNA sequence of clone 61220114

[0693] SEQ ID NO:653 is the determined cDNA sequence of clone 61220115

[0694] SEQ ID NO:654 is the determined cDNA sequence of clone 61220116

[0695] SEQ ID NO:655 is the determined cDNA sequence of clone 61220117

[0696] SEQ ID NO:656 is the determined cDNA sequence of clone 61220118

[0697] SEQ ID NO:657 is the determined cDNA sequence of clone 61220119

[0698] SEQ ID NO:658 is the determined cDNA sequence of clone 61220120

[0699] SEQ ID NO:659 is the determined cDNA sequence of clone 61220121

[0700] SEQ ID NO:660 is the determined cDNA sequence of clone 61220122

[0701] SEQ ID NO:661 is the determined cDNA sequence of clone 61220124

[0702] SEQ ID NO:662 is the determined cDNA sequence of clone 61220125

[0703] SEQ ID NO:663 is the determined cDNA sequence of clone 61220126

[0704] SEQ ID NO:664 is the determined cDNA sequence of clone 61220127

[0705] SEQ ID NO:665 is the determined cDNA sequence of clone 61220128

[0706] SEQ ID NO:666 is the determined cDNA sequence of clone 61220129

[0707] SEQ ID NO:667 is the determined cDNA sequence of clone 61220130

[0708] SEQ ID NO:668 is the determined cDNA sequence of clone 61220133

[0709] SEQ ID NO:669 is the determined cDNA sequence of clone 61220134

[0710] SEQ ID NO:670 is the determined cDNA sequence of clone 61220135

[0711] SEQ ID NO:671 is the determined cDNA sequence of clone 61220137

[0712] SEQ ID NO:672 is the determined cDNA sequence of clone 61220139

[0713] SEQ ID NO:673 is the determined cDNA sequence of clone 61220140

[0714] SEQ ID NO:674 is the determined cDNA sequence of clone 61220141

[0715] SEQ ID NO:675 is the determined cDNA sequence of clone 61220142

[0716] SEQ ID NO:676 is the determined cDNA sequence of clone 61220143

[0717] SEQ ID NO:677 is the determined cDNA sequence of clone 61220144

[0718] SEQ ID NO:678 is the determined cDNA sequence of clone 61220146

[0719] SEQ ID NO:679 is the determined cDNA sequence of clone 61220147

[0720] SEQ ID NO:680 is the determined cDNA sequence of clone 61219777

[0721] SEQ ID NO:681 is the determined cDNA sequence of clone 61219778

[0722] SEQ ID NO:682 is the determined cDNA sequence of clone 61219779

[0723] SEQ ID NO:683 is the determined cDNA sequence of clone 61219780

[0724] SEQ ID NO:684 is the determined cDNA sequence of clone 61219781

[0725] SEQ ID NO:685 is the determined cDNA sequence of clone 61219782

[0726] SEQ ID NO:686 is the determined cDNA sequence of clone 61219783

[0727] SEQ ID NO:687 is the determined cDNA sequence of clone 61219784

[0728] SEQ ID NO:688 is the determined cDNA sequence of clone 61219785

[0729] SEQ ID NO:689 is the determined cDNA sequence of clone 61219786

[0730] SEQ ID NO:690 is the determined cDNA sequence of clone 61219787

[0731] SEQ ID NO:691 is the determined cDNA sequence of clone 61219788

[0732] SEQ ID NO:692 is the determined cDNA sequence of clone 61219789

[0733] SEQ ID NO:693 is the determined cDNA sequence of clone 61219790

[0734] SEQ ID NO:694 is the determined cDNA sequence of clone 61219791

[0735] SEQ ID NO:695 is the determined cDNA sequence of clone 61219792

[0736] SEQ ID NO:696 is the determined cDNA sequence of clone 61219793

[0737] SEQ ID NO:697 is the determined cDNA sequence of clone 61219794

[0738] SEQ ID NO:698 is the determined cDNA sequence of clone 61219795

[0739] SEQ ID NO:699 is the determined cDNA sequence of clone 61219797

[0740] SEQ ID NO:700 is the determined cDNA sequence of clone 61219798

[0741] SEQ ID NO:701 is the determined cDNA sequence of clone 61219799

[0742] SEQ ID NO:702 is the determined cDNA sequence of clone 61219800

[0743] SEQ ID NO:703 is the determined cDNA sequence of clone 61219801

[0744] SEQ ID NO:704 is the determined cDNA sequence of clone 61219802

[0745] SEQ ID NO:705 is the determined cDNA sequence of clone 61219803

[0746] SEQ ID NO:706 is the determined cDNA sequence of clone 61219804

[0747] SEQ ID NO:707 is the determined cDNA sequence of clone 61219805

[0748] SEQ ID NO:708 is the determined cDNA sequence of clone 61219806

[0749] SEQ ID NO:709 is the determined cDNA sequence of clone 61219807

[0750] SEQ ID NO:710 is the determined cDNA sequence of clone 61219808

[0751] SEQ ID NO:711 is the determined cDNA sequence of clone 61219809

[0752] SEQ ID NO:712 is the determined cDNA sequence of clone 61219810

[0753] SEQ ID NO:713 is the determined cDNA sequence of clone 61219812

[0754] SEQ ID NO:714 is the determined cDNA sequence of clone 61219814

[0755] SEQ ID NO:715 is the determined cDNA sequence of clone 61219815

[0756] SEQ ID NO:716 is the determined cDNA sequence of clone 61219816

[0757] SEQ ID NO:717 is the determined cDNA sequence of clone 61219817

[0758] SEQ ID NO:718 is the determined cDNA sequence of clone 61219818

[0759] SEQ ID NO:719 is the determined cDNA sequence of clone 61219819

[0760] SEQ ID NO:720 is the determined cDNA sequence of clone 61219820

[0761] SEQ ID NO:721 is the determined cDNA sequence of clone 61219821

[0762] SEQ ID NO:722 is the determined cDNA sequence of clone 61219822

[0763] SEQ ID NO:723 is the determined cDNA sequence of clone 61219823

[0764] SEQ ID NO:724 is the determined cDNA sequence of clone 61219824

[0765] SEQ ID NO:725 is the determined cDNA sequence of clone 61219825

[0766] SEQ ID NO:726 is the determined cDNA sequence of clone 61219826

[0767] SEQ ID NO:727 is the determined cDNA sequence of clone 61219827

[0768] SEQ ID NO:728 is the determined cDNA sequence of clone 61219828

[0769] SEQ ID NO:729 is the determined cDNA sequence of clone 61219829

[0770] SEQ ID NO:730 is the determined cDNA sequence of clone 61219830

[0771] SEQ ID NO:731 is the determined cDNA sequence of clone 61219831

[0772] SEQ ID NO:732 is the determined cDNA sequence of clone 61219832

[0773] SEQ ID NO:733 is the determined cDNA sequence of clone 61219833

[0774] SEQ ID NO:734 is the determined cDNA sequence of clone 61219834

[0775] SEQ ID NO:735 is the determined cDNA sequence of clone 61219835

[0776] SEQ ID NO:736 is the determined cDNA sequence of clone 61219836

[0777] SEQ ID NO:737 is the determined cDNA sequence of clone 61219838

[0778] SEQ ID NO:738 is the determined cDNA sequence of clone 61219839

[0779] SEQ ID NO:739 is the determined cDNA sequence of clone 61219840

[0780] SEQ ID NO:740 is the determined cDNA sequence of clone 61219841

[0781] SEQ ID NO:741 is the determined cDNA sequence of clone 61219842

[0782] SEQ ID NO:742 is the determined cDNA sequence of clone 61219843

[0783] SEQ ID NO:743 is the determined cDNA sequence of clone 61219844

[0784] SEQ ID NO:744 is the determined cDNA sequence of clone 61219845

[0785] SEQ ID NO:745 is the determined cDNA sequence of clone 61219846

[0786] SEQ ID NO:746 is the determined cDNA sequence of clone 61219848

[0787] SEQ ID NO:747 is the determined cDNA sequence of clone 61219850

[0788] SEQ ID NO:748 is the determined cDNA sequence of clone 61219851

[0789] SEQ ID NO:749 is the determined cDNA sequence of clone 61219853

[0790] SEQ ID NO:750 is the determined cDNA sequence of clone 61219854

[0791] SEQ ID NO:751 is the determined cDNA sequence of clone 61219857

[0792] SEQ ID NO:752 is the determined cDNA sequence of clone 61219858

[0793] SEQ ID NO:753 is the determined cDNA sequence of clone 61219859

[0794] SEQ ID NO:754 is the determined cDNA sequence of clone 61219860

[0795] SEQ ID NO:755 is the determined cDNA sequence of clone 61219861

[0796] SEQ ID NO:756 is the determined cDNA sequence of clone 61219862

[0797] SEQ ID NO:757 is the determined cDNA sequence of clone 61219863

[0798] SEQ ID NO:758 is the determined cDNA sequence of clone 61219864

[0799] SEQ ID NO:759 is the determined cDNA sequence of clone 61219865

[0800] SEQ ID NO:760 is the determined cDNA sequence of clone 61219866

[0801] SEQ ID NO:761 is the determined cDNA sequence of clone 61219867

[0802] SEQ ID NO:762 is the determined cDNA sequence of clone 61219869

[0803] SEQ ID NO:763 is the determined cDNA sequence of clone 61220149

[0804] SEQ ID NO:764 is the determined cDNA sequence of clone 61220150

[0805] SEQ ID NO:765 is the determined cDNA sequence of clone 61220151

[0806] SEQ ID NO:766 is the determined cDNA sequence of clone 61220152

[0807] SEQ ID NO:767 is the determined cDNA sequence of clone 61220153

[0808] SEQ ID NO:768 is the determined cDNA sequence of clone 61220154

[0809] SEQ ID NO:769 is the determined cDNA sequence of clone 61220156

[0810] SEQ ID NO:770 is the determined cDNA sequence of clone 61220158

[0811] SEQ ID NO:771 is the determined cDNA sequence of clone 61220159

[0812] SEQ ID NO:772 is the determined cDNA sequence of clone 61220160

[0813] SEQ ID NO:773 is the determined cDNA sequence of clone 61220161

[0814] SEQ ID NO:774 is the determined cDNA sequence of clone 61220162

[0815] SEQ ID NO:775 is the determined cDNA sequence of clone 61220163

[0816] SEQ ID NO:776 is the determined cDNA sequence of clone 61220164

[0817] SEQ ID NO:777 is the determined cDNA sequence of clone 61220167

[0818] SEQ ID NO:778 is the determined cDNA sequence of clone 61220168

[0819] SEQ ID NO:779 is the determined cDNA sequence of clone 61220169

[0820] SEQ ID NO:780 is the determined cDNA sequence of clone 61220170

[0821] SEQ ID NO:781 is the determined cDNA sequence of clone 61220171

[0822] SEQ ID NO:782 is the determined cDNA sequence of clone 61220172

[0823] SEQ ID NO:783 is the determined cDNA sequence of clone 61220173

[0824] SEQ ID NO:784 is the determined cDNA sequence of clone 61220175

[0825] SEQ ID NO:785 is the determined cDNA sequence of clone 61220176

[0826] SEQ ID NO:786 is the determined cDNA sequence of clone 61220177

[0827] SEQ ID NO:787 is the determined cDNA sequence of clone 61220178

[0828] SEQ ID NO:788 is the determined cDNA sequence of clone 61220179

[0829] SEQ ID NO:789 is the determined cDNA sequence of clone 61220180

[0830] SEQ ID NO:790 is the determined cDNA sequence of clone 61220181

[0831] SEQ ID NO:791 is the determined cDNA sequence of clone 61220182

[0832] SEQ ID NO:792 is the determined cDNA sequence of clone 61220183

[0833] SEQ ID NO:793 is the determined cDNA sequence of clone 61220184

[0834] SEQ ID NO:794 is the determined cDNA sequence of clone 61220185

[0835] SEQ ID NO:795 is the determined cDNA sequence of clone 61220186

[0836] SEQ ID NO:796 is the determined cDNA sequence of clone 61220187

[0837] SEQ ID NO:797 is the determined cDNA sequence of clone 61220188

[0838] SEQ ID NO:798 is the determined cDNA sequence of clone 61220189

[0839] SEQ ID NO:799 is the determined cDNA sequence of clone 61220190

[0840] SEQ ID NO:800 is the determined cDNA sequence of clone 61220192

[0841] SEQ ID NO:801 is the determined cDNA sequence of clone 61220193

[0842] SEQ ID NO:802 is the determined cDNA sequence of clone 61220194

[0843] SEQ ID NO:803 is the determined cDNA sequence of clone 61220195

[0844] SEQ ID NO:804 is the determined cDNA sequence of clone 61220196

[0845] SEQ ID NO:805 is the determined cDNA sequence of clone 61220198

[0846] SEQ ID NO:806 is the determined cDNA sequence of clone 61220199

[0847] SEQ ID NO:807 is the determined cDNA sequence of clone 61220200

[0848] SEQ ID NO:808 is the determined cDNA sequence of clone 61220203

[0849] SEQ ID NO:809 is the determined cDNA sequence of clone 61220204

[0850] SEQ ID NO:810 is the determined cDNA sequence of clone 61220205

[0851] SEQ ID NO:811 is the determined cDNA sequence of clone 61220207

[0852] SEQ ID NO:812 is the determined cDNA sequence of clone 61220208

[0853] SEQ ID NO:813 is the determined cDNA sequence of clone 61220209

[0854] SEQ ID NO:814 is the determined cDNA sequence of clone 61220210

[0855] SEQ ID NO:815 is the determined cDNA sequence of clone 61220211

[0856] SEQ ID NO:816 is the determined cDNA sequence of clone 61220213

[0857] SEQ ID NO:817 is the determined cDNA sequence of clone 61220214

[0858] SEQ ID NO:818 is the determined cDNA sequence of clone 61220216

[0859] SEQ ID NO:819 is the determined cDNA sequence of clone 61220217

[0860] SEQ ID NO:820 is the determined cDNA sequence of clone 61220219

[0861] SEQ ID NO:821 is the determined cDNA sequence of clone 61220220

[0862] SEQ ID NO:822 is the determined cDNA sequence of clone 61220221

[0863] SEQ ID NO:823 is the determined cDNA sequence of clone 61220222

[0864] SEQ ID NO:824 is the determined cDNA sequence of clone 61220223

[0865] SEQ ID NO:825 is the determined cDNA sequence of clone 61220224

[0866] SEQ ID NO:826 is the determined cDNA sequence of clone 61220225

[0867] SEQ ID NO:827 is the determined cDNA sequence of clone 61220226

[0868] SEQ ID NO:828 is the determined cDNA sequence of clone 61220227

[0869] SEQ ID NO:829 is the determined cDNA sequence of clone 61220228

[0870] SEQ ID NO:830 is the determined cDNA sequence of clone 61220230

[0871] SEQ ID NO:831 is the determined cDNA sequence of clone 61220231

[0872] SEQ ID NO:832 is the determined cDNA sequence of clone 61220232

[0873] SEQ ID NO:833 is the determined cDNA sequence of clone 61220233

[0874] SEQ ID NO:834 is the determined cDNA sequence of clone 61220234

[0875] SEQ ID NO:835 is the determined cDNA sequence of clone 61220235

[0876] SEQ ID NO:836 is the determined cDNA sequence of clone 61220236

[0877] SEQ ID NO:837 is the determined cDNA sequence of clone 61220237

[0878] SEQ ID NO:838 is the determined cDNA sequence of clone 61220239

[0879] SEQ ID NO:839 is the determined cDNA sequence of clone 61220240

[0880] SEQ ID NO:840 is the determined cDNA sequence of clone 61220241

[0881] SEQ ID NO:841 is the determined cDNA sequence of clone 61220242

[0882] SEQ ID NO:842 is the determined cDNA sequence of clone 61220244

[0883] SEQ ID NO:843 is the determined cDNA sequence of clone 61220245

[0884] SEQ ID NO:844 is the determined cDNA sequence of clone 61220246

[0885] SEQ ID NO:845 is the determined cDNA sequence of clone 61220247

[0886] SEQ ID NO:846 is the determined cDNA sequence of clone 61220248

[0887] SEQ ID NO:847 is the determined cDNA sequence of clone 61220249

[0888] SEQ ID NO:848 is the determined cDNA sequence of clone 61220250

[0889] SEQ ID NO:849 is the determined cDNA sequence of clone 61220251

[0890] SEQ ID NO:850 is the determined cDNA sequence of clone 61220252

[0891] SEQ ID NO:851 is the determined cDNA sequence of clone 61220253

[0892] SEQ ID NO:852 is the determined cDNA sequence of clone 61220254

[0893] SEQ ID NO:853 is the determined cDNA sequence of clone 61220255

[0894] SEQ ID NO:854 is the determined cDNA sequence of clone 61220256

[0895] SEQ ID NO:855 is the determined cDNA sequence of clone 61220258

[0896] SEQ ID NO:856 is the determined cDNA sequence of clone 61220259

[0897] SEQ ID NO:857 is the determined cDNA sequence of clone 61220260

[0898] SEQ ID NO:858 is the determined cDNA sequence of clone 61220261

[0899] SEQ ID NO:859 is the determined cDNA sequence of clone 61220262

[0900] SEQ ID NO:860 is the determined cDNA sequence of clone 61220263

[0901] SEQ ID NO:861 is the determined cDNA sequence of clone 61220264

[0902] SEQ ID NO:862 is the determined cDNA sequence of clone 61220265

[0903] SEQ ID NO:863 is the determined cDNA sequence of clone 61220267

[0904] SEQ ID NO:864 is the determined cDNA sequence of clone 61220268

[0905] SEQ ID NO:865 is the determined cDNA sequence of clone 61220269

[0906] SEQ ID NO:866 is the determined cDNA sequence of clone 61220270

[0907] SEQ ID NO:867 is the determined cDNA sequence of clone 61220271

[0908] SEQ ID NO:868 is the determined cDNA sequence of clone 61220272

[0909] SEQ ID NO:869 is the determined cDNA sequence of clone 61220273

[0910] SEQ ID NO:870 is the determined cDNA sequence of clone 61220274

[0911] SEQ ID NO:871 is the determined cDNA sequence of clone 61220275

[0912] SEQ ID NO:872 is the determined cDNA sequence of clone 61220278

[0913] SEQ ID NO:873 is the determined cDNA sequence of clone 61220279

[0914] SEQ ID NO:874 is the determined cDNA sequence of clone 61220280

[0915] SEQ ID NO:875 is the determined cDNA sequence of clone 61220281

[0916] SEQ ID NO:876 is the determined cDNA sequence of clone 61220282

[0917] SEQ ID NO:877 is the determined cDNA sequence of clone 61220283

[0918] SEQ ID NO:878 is the determined cDNA sequence of clone 61220284

[0919] SEQ ID NO:879 is the determined cDNA sequence of clone 61220285

[0920] SEQ ID NO:880 is the determined cDNA sequence of clone 61220287

[0921] SEQ ID NO:881 is the determined cDNA sequence of clone 61220288

[0922] SEQ ID NO:882 is the determined cDNA sequence of clone 61220290

[0923] SEQ ID NO:883 is the determined cDNA sequence of clone 61220291

[0924] SEQ ID NO:884 is the determined cDNA sequence of clone 61220292

[0925] SEQ ID NO:885 is the determined cDNA sequence of clone 61220293

[0926] SEQ ID NO:886 is the determined cDNA sequence of clone 61220294

[0927] SEQ ID NO:887 is the determined cDNA sequence of clone 61220295

[0928] SEQ ID NO:888 is the determined cDNA sequence of clone 61220296

[0929] SEQ ID NO:889 is the determined cDNA sequence of clone 61220298

[0930] SEQ ID NO:890 is the determined cDNA sequence of clone 61220299

[0931] SEQ ID NO:891 is the determined cDNA sequence of clone 61220300

[0932] SEQ ID NO:892 is the determined cDNA sequence of clone 61220301

[0933] SEQ ID NO:893 is the determined cDNA sequence of clone 61220302

[0934] SEQ ID NO:894 is the determined cDNA sequence of clone 61220303

[0935] SEQ ID NO:895 is the determined cDNA sequence of clone 61220304

[0936] SEQ ID NO:896 is the determined cDNA sequence of clone 61220305

[0937] SEQ ID NO:897 is the determined cDNA sequence of clone 61220307

[0938] SEQ ID NO:898 is the determined cDNA sequence of clone 61220308

[0939] SEQ ID NO:899 is the determined cDNA sequence of clone 61220309

[0940] SEQ ID NO:900 is the determined cDNA sequence of clone 61220310

[0941] SEQ ID NO:901 is the determined cDNA sequence of clone 61220314

[0942] SEQ ID NO:902 is the determined cDNA sequence of clone 61220316

[0943] SEQ ID NO:903 is the determined cDNA sequence of clone 61220317

[0944] SEQ ID NO:904 is the determined cDNA sequence of clone 61220318

[0945] SEQ ID NO:905 is the determined cDNA sequence of clone 61220319

[0946] SEQ ID NO:906 is the determined cDNA sequence of clone 61220320

[0947] SEQ ID NO:907 is the determined cDNA sequence of clone 61220321

[0948] SEQ ID NO:908 is the determined cDNA sequence of clone 61220322

[0949] SEQ ID NO:909 is the determined cDNA sequence of clone 61220323

[0950] SEQ ID NO:910 is the determined cDNA sequence of clone 61220324

[0951] SEQ ID NO:911 is the determined cDNA sequence of clone 61220325

[0952] SEQ ID NO:912 is the determined cDNA sequence of clone 61220327

[0953] SEQ ID NO:913 is the determined cDNA sequence of clone 61220328

[0954] SEQ ID NO:914 is the determined cDNA sequence of clone 61220330

[0955] SEQ ID NO:915 is the determined cDNA sequence of clone 61220331

[0956] SEQ ID NO:916 is the determined cDNA sequence of clone 61220332

[0957] SEQ ID NO:917 is the determined cDNA sequence of clone 61220333

[0958] SEQ ID NO:918 is the determined cDNA sequence of clone 61220334

[0959] SEQ ID NO:919 is the determined cDNA sequence of clone 61219870

[0960] SEQ ID NO:920 is the determined cDNA sequence of clone 61219871

[0961] SEQ ID NO:921 is the determined cDNA sequence of clone 61219872

[0962] SEQ ID NO:922 is the determined cDNA sequence of clone 61219874

[0963] SEQ ID NO:923 is the determined cDNA sequence of clone 61219875

[0964] SEQ ID NO:924 is the determined cDNA sequence of clone 61219877

[0965] SEQ ID NO:925 is the determined cDNA sequence of clone 61219878

[0966] SEQ ID NO:926 is the determined cDNA sequence of clone 61219879

[0967] SEQ ID NO:927 is the determined cDNA sequence of clone 61219880

[0968] SEQ ID NO:928 is the determined cDNA sequence of clone 61219881

[0969] SEQ ID NO:929 is the determined cDNA sequence of clone 61219882

[0970] SEQ ID NO:930 is the determined cDNA sequence of clone 61219883

[0971] SEQ ID NO:931 is the determined cDNA sequence of clone 61219884

[0972] SEQ ID NO:932 is the determined cDNA sequence of clone 61219885

[0973] SEQ ID NO:933 is the determined cDNA sequence of clone 61219886

[0974] SEQ ID NO:934 is the determined cDNA sequence of clone 61219887

[0975] SEQ ID NO:935 is the determined cDNA sequence of clone 61219888

[0976] SEQ ID NO:936 is the determined cDNA sequence of clone 61219889

[0977] SEQ ID NO:937 is the determined cDNA sequence of clone 61219892

[0978] SEQ ID NO:938 is the determined cDNA sequence of clone 61219893

[0979] SEQ ID NO:939 is the determined cDNA sequence of clone 61219894

[0980] SEQ ID NO:940 is the determined cDNA sequence of clone 61219895

[0981] SEQ ID NO:941 is the determined cDNA sequence of clone 61219897

[0982] SEQ ID NO:942 is the determined cDNA sequence of clone 61219898

[0983] SEQ ID NO:943 is the determined cDNA sequence of clone 61219899

[0984] SEQ ID NO:944 is the determined cDNA sequence of clone 61219900

[0985] SEQ ID NO:945 is the determined cDNA sequence of clone 61219901

[0986] SEQ ID NO:946 is the determined cDNA sequence of clone 61219902

[0987] SEQ ID NO:947 is the determined cDNA sequence of clone 61219903

[0988] SEQ ID NO:948 is the determined cDNA sequence of clone 61219905

[0989] SEQ ID NO:949 is the determined cDNA sequence of clone 61219906

[0990] SEQ ID NO:950 is the determined cDNA sequence of clone 61219907

[0991] SEQ ID NO:951 is the determined cDNA sequence of clone 61219908

[0992] SEQ ID NO:952 is the determined cDNA sequence of clone 61219909

[0993] SEQ ID NO:953 is the determined cDNA sequence of clone 61219910

[0994] SEQ ID NO:954 is the determined cDNA sequence of clone 61219911

[0995] SEQ ID NO:955 is the determined cDNA sequence of clone 61219912

[0996] SEQ ID NO:956 is the determined cDNA sequence of clone 61219914

[0997] SEQ ID NO:957 is the determined cDNA sequence of clone 61219915

[0998] SEQ ID NO:958 is the determined cDNA sequence of clone 61219916

[0999] SEQ ID NO:959 is the determined cDNA sequence of clone 61219917

[1000] SEQ ID NO:960 is the determined cDNA sequence of clone 61219918

[1001] SEQ ID NO:961 is the determined cDNA sequence of clone 61219919

[1002] SEQ ID NO:962 is the determined cDNA sequence of clone 61219920

[1003] SEQ ID NO:963 is the determined cDNA sequence of clone 61219921

[1004] SEQ ID NO:964 is the determined cDNA sequence of clone 61219922

[1005] SEQ ID NO:965 is the determined cDNA sequence of clone 61219923

[1006] SEQ ID NO:966 is the determined cDNA sequence of clone 61219927

[1007] SEQ ID NO:967 is the determined cDNA sequence of clone 61219928

[1008] SEQ ID NO:968 is the determined cDNA sequence of clone 61219929

[1009] SEQ ID NO:969 is the determined cDNA sequence of clone 61219932

[1010] SEQ ID NO:970 is the determined cDNA sequence of clone 61219933

[1011] SEQ ID NO:971 is the determined cDNA sequence of clone 61219934

[1012] SEQ ID NO:972 is the determined cDNA sequence of clone 61219935

[1013] SEQ ID NO:973 is the determined cDNA sequence of clone 61219936

[1014] SEQ ID NO:974 is the determined cDNA sequence of clone 61219937

[1015] SEQ ID NO:975 is the determined cDNA sequence of clone 61219938

[1016] SEQ ID NO:976 is the determined cDNA sequence of clone 61219940

[1017] SEQ ID NO:977 is the determined cDNA sequence of clone 61219941

[1018] SEQ ID NO:978 is the determined cDNA sequence of clone 61219942

[1019] SEQ ID NO:979 is the determined cDNA sequence of clone 61219943

[1020] SEQ ID NO:980 is the determined cDNA sequence of clone 61219944

[1021] SEQ ID NO:981 is the determined cDNA sequence of clone 61219946

[1022] SEQ ID NO:982 is the determined cDNA sequence of clone 61219947

[1023] SEQ ID NO:983 is the determined cDNA sequence of clone 61219948

[1024] SEQ ID NO:984 is the determined cDNA sequence of clone 61219949

[1025] SEQ ID NO:985 is the determined cDNA sequence of clone 61219951

[1026] SEQ ID NO:986 is the determined cDNA sequence of clone 61219952

[1027] SEQ ID NO:987 is the determined cDNA sequence of clone 61219953

[1028] SEQ ID NO:988 is the determined cDNA sequence of clone 61219955

[1029] SEQ ID NO:989 is the determined cDNA sequence of clone 61219956

[1030] SEQ ID NO:990 is the determined cDNA sequence of clone 61219957

[1031] SEQ ID NO:991 is the determined cDNA sequence of clone 61219959

[1032] SEQ ID NO:992 is the determined cDNA sequence of clone 61219961

[1033] SEQ ID NO:993 is the determined cDNA sequence of clone 61219962

[1034] SEQ ID NO:994 is the determined cDNA sequence of clone 61220338

[1035] SEQ ID NO:995 is the determined cDNA sequence of clone 61220339

[1036] SEQ ID NO:996 is the determined cDNA sequence of clone 61220340

[1037] SEQ ID NO:997 is the determined cDNA sequence of clone 61220341

[1038] SEQ ID NO:998 is the determined cDNA sequence of clone 61220342

[1039] SEQ ID NO:999 is the determined cDNA sequence of clone 61220343

[1040] SEQ ID NO:1000 is the determined cDNA sequence of clone 61220344

[1041] SEQ ID NO:1001 is the determined cDNA sequence of clone 61220345

[1042] SEQ ID NO:1002 is the determined cDNA sequence of clone 61220346

[1043] SEQ ID NO:1003 is the determined cDNA sequence of clone 61220347

[1044] SEQ ID NO:1004 is the determined cDNA sequence of clone 61220348

[1045] SEQ ID NO:1005 is the determined cDNA sequence of clone 61220349

[1046] SEQ ID NO:1006 is the determined cDNA sequence of clone 61220350

[1047] SEQ ID NO:1007 is the determined cDNA sequence of clone 61220351

[1048] SEQ ID NO:1008 is the determined cDNA sequence of clone 61220352

[1049] SEQ ID NO:1009 is the determined cDNA sequence of clone 61220353

[1050] SEQ ID NO:1010 is the determined cDNA sequence of clone 61220354

[1051] SEQ ID NO:1011 is the determined cDNA sequence of clone 61220356

[1052] SEQ ID NO:1012 is the determined cDNA sequence of clone 61220357

[1053] SEQ ID NO:1013 is the determined cDNA sequence of clone 61220358

[1054] SEQ ID NO:1014 is the determined cDNA sequence of clone 61220359

[1055] SEQ ID NO:1015 is the determined cDNA sequence of clone 61220360

[1056] SEQ ID NO:1016 is the determined cDNA sequence of clone 61220361

[1057] SEQ ID NO:1017 is the determined cDNA sequence of clone 61220362

[1058] SEQ ID NO:1018 is the determined cDNA sequence of clone 61220363

[1059] SEQ ID NO:1019 is the determined cDNA sequence of clone 61220364

[1060] SEQ ID NO:1020 is the determined cDNA sequence of clone 61220365

[1061] SEQ ID NO:1021 is the determined cDNA sequence of clone 61220366

[1062] SEQ ID NO:1022 is the determined cDNA sequence of clone 61220367

[1063] SEQ ID NO:1023 is the determined cDNA sequence of clone 61220368

[1064] SEQ ID NO:1024 is the determined cDNA sequence of clone 61220369

[1065] SEQ ID NO:1025 is the determined cDNA sequence of clone 61220370

[1066] SEQ ID NO:1026 is the determined cDNA sequence of clone 61220372

[1067] SEQ ID NO:1027 is the determined cDNA sequence of clone 61220373

[1068] SEQ ID NO:1028 is the determined cDNA sequence of clone 61220374

[1069] SEQ ID NO:1029 is the determined cDNA sequence of clone 61220375

[1070] SEQ ID NO:1030 is the determined cDNA sequence of clone 61220376

[1071] SEQ ID NO:1031 is the determined cDNA sequence of clone 61220377

[1072] SEQ ID NO:1032 is the determined cDNA sequence of clone 61220378

[1073] SEQ ID NO:1033 is the determined cDNA sequence of clone 61220380

[1074] SEQ ID NO:1034 is the determined cDNA sequence of clone 61220381

[1075] SEQ ID NO:1035 is the determined cDNA sequence of clone 61220382

[1076] SEQ ID NO:1036 is the determined cDNA sequence of clone 61220383

[1077] SEQ ID NO:1037 is the determined cDNA sequence of clone 61220385

[1078] SEQ ID NO:1038 is the determined cDNA sequence of clone 61220386

[1079] SEQ ID NO:1039 is the determined cDNA sequence of clone 61220387

[1080] SEQ ID NO:1040 is the determined cDNA sequence of clone 61220388

[1081] SEQ ID NO:1041 is the determined cDNA sequence of clone 61220389

[1082] SEQ ID NO:1042 is the determined cDNA sequence of clone 61220390

[1083] SEQ ID NO:1043 is the determined cDNA sequence of clone 61220391

[1084] SEQ ID NO:1044 is the determined cDNA sequence of clone 61220392

[1085] SEQ ID NO:1045 is the determined cDNA sequence of clone 61220393

[1086] SEQ ID NO:1046 is the determined cDNA sequence of clone 61220394

[1087] SEQ ID NO:1047 is the determined cDNA sequence of clone 61220395

[1088] SEQ ID NO:1048 is the determined cDNA sequence of clone 61220396

[1089] SEQ ID NO:1049 is the determined cDNA sequence of clone 61220398

[1090] SEQ ID NO:1050 is the determined cDNA sequence of clone 61220399

[1091] SEQ ID NO:1051 is the determined cDNA sequence of clone 61220402

[1092] SEQ ID NO:1052 is the determined cDNA sequence of clone 61220403

[1093] SEQ ID NO:1053 is the determined cDNA sequence of clone 61220404

[1094] SEQ ID NO:1054 is the determined cDNA sequence of clone 61220405

[1095] SEQ ID NO:1055 is the determined cDNA sequence of clone 61220406

[1096] SEQ ID NO:1056 is the determined cDNA sequence of clone 61220407

[1097] SEQ ID NO:1057 is the determined cDNA sequence of clone 61220408

[1098] SEQ ID NO:1058 is the determined cDNA sequence of clone 61220409

[1099] SEQ ID NO:1059 is the determined cDNA sequence of clone 61220410

[1100] SEQ ID NO:1060 is the determined cDNA sequence of clone 61220411

[1101] SEQ ID NO:1061 is the determined cDNA sequence of clone 61220413

[1102] SEQ ID NO:1062 is the determined cDNA sequence of clone 61220414

[1103] SEQ ID NO:1063 is the determined cDNA sequence of clone 61220415

[1104] SEQ ID NO:1064 is the determined cDNA sequence of clone 61220418

[1105] SEQ ID NO:1065 is the determined cDNA sequence of clone 61220419

[1106] SEQ ID NO:1066 is the determined cDNA sequence of clone 61220421

[1107] SEQ ID NO:1067 is the determined cDNA sequence of clone 61220422

[1108] SEQ ID NO:1068 is the determined cDNA sequence of clone 61220423

[1109] SEQ ID NO:1069 is the determined cDNA sequence of clone 61220424

[1110] SEQ ID NO:1070 is the determined cDNA sequence of clone 61220426

[1111] SEQ ID NO:1071 is the determined cDNA sequence of clone 61220427

[1112] SEQ ID NO:1072 is the determined cDNA sequence of clone 61219963

[1113] SEQ ID NO:1073 is the determined cDNA sequence of clone 61219964

[1114] SEQ ID NO:1074 is the determined cDNA sequence of clone 61219966

[1115] SEQ ID NO:1075 is the determined cDNA sequence of clone 61219967

[1116] SEQ ID NO:1076 is the determined cDNA sequence of clone 61219968

[1117] SEQ ID NO:1077 is the determined cDNA sequence of clone 61219969

[1118] SEQ ID NO:1078 is the determined cDNA sequence of clone 61219970

[1119] SEQ ID NO:1079 is the determined cDNA sequence of clone 61219971

[1120] SEQ ID NO:1080 is the determined cDNA sequence of clone 61219973

[1121] SEQ ID NO:1081 is the determined cDNA sequence of clone 61219974

[1122] SEQ ID NO:1082 is the determined cDNA sequence of clone 61219975

[1123] SEQ ID NO:1083 is the determined cDNA sequence of clone 61219978

[1124] SEQ ID NO:1084 is the determined cDNA sequence of clone 61219979

[1125] SEQ ID NO:1085 is the determined cDNA sequence of clone 61219980

[1126] SEQ ID NO:1086 is the determined cDNA sequence of clone 61219981

[1127] SEQ ID NO:1087 is the determined cDNA sequence of clone 61219982

[1128] SEQ ID NO:1088 is the determined cDNA sequence of clone 61219983

[1129] SEQ ID NO:1089 is the determined cDNA sequence of clone 61219984

[1130] SEQ ID NO:1090 is the determined cDNA sequence of clone 61219985

[1131] SEQ ID NO:1091 is the determined cDNA sequence of clone 61219986

[1132] SEQ ID NO:1092 is the determined cDNA sequence of clone 61219987

[1133] SEQ ID NO:1093 is the determined cDNA sequence of clone 61219988

[1134] SEQ ID NO:1094 is the determined cDNA sequence of clone 61219990

[1135] SEQ ID NO:1095 is the determined cDNA sequence of clone 61219991

[1136] SEQ ID NO:1096 is the determined cDNA sequence of clone 61219992

[1137] SEQ ID NO:1097 is the determined cDNA sequence of clone 61219993

[1138] SEQ ID NO:1098 is the determined cDNA sequence of clone 61219994

[1139] SEQ ID NO:1099 is the determined cDNA sequence of clone 61219995

[1140] SEQ ID NO:1100 is the determined cDNA sequence of clone 61219996

[1141] SEQ ID NO:1101 is the determined cDNA sequence of clone 61219997

[1142] SEQ ID NO:1102 is the determined cDNA sequence of clone 61219999

[1143] SEQ ID NO:1103 is the determined cDNA sequence of clone 61220000

[1144] SEQ ID NO:1104 is the determined cDNA sequence of clone 61220001

[1145] SEQ ID NO:1105 is the determined cDNA sequence of clone 61220002

[1146] SEQ ID NO:1106 is the determined cDNA sequence of clone 61220003

[1147] SEQ ID NO:1107 is the determined cDNA sequence of clone 61220004

[1148] SEQ ID NO:1108 is the determined cDNA sequence of clone 61220005

[1149] SEQ ID NO:1109 is the determined cDNA sequence of clone 61220006

[1150] SEQ ID NO:1110 is the determined cDNA sequence of clone 61220007

[1151] SEQ ID NO:1111 is the determined cDNA sequence of clone 61220008

[1152] SEQ ID NO:1112 is the determined cDNA sequence of clone 61220009

[1153] SEQ ID NO:1113 is the determined cDNA sequence of clone 61220011

[1154] SEQ ID NO:1114 is the determined cDNA sequence of clone 61220012

[1155] SEQ ID NO:1115 is the determined cDNA sequence of clone 61220014

[1156] SEQ ID NO:1116 is the determined cDNA sequence of clone 61220015

[1157] SEQ ID NO:1117 is the determined cDNA sequence of clone 61220016

[1158] SEQ ID NO:1118 is the determined cDNA sequence of clone 61220017

[1159] SEQ ID NO:1119 is the determined cDNA sequence of clone 61220018

[1160] SEQ ID NO:1120 is the determined cDNA sequence of clone 61220020

[1161] SEQ ID NO:1121 is the determined cDNA sequence of clone 61220022

[1162] SEQ ID NO:1122 is the determined cDNA sequence of clone 61220023

[1163] SEQ ID NO:1123 is the determined cDNA sequence of clone 61220025

[1164] SEQ ID NO:1124 is the determined cDNA sequence of clone 61220026

[1165] SEQ ID NO:1125 is the determined cDNA sequence of clone 61220027

[1166] SEQ ID NO:1126 is the determined cDNA sequence of clone 61220028

[1167] SEQ ID NO:1127 is the determined cDNA sequence of clone 61220029

[1168] SEQ ID NO:1128 is the determined cDNA sequence of clone 61220032

[1169] SEQ ID NO:1129 is the determined cDNA sequence of clone 61220033

[1170] SEQ ID NO:1130 is the determined cDNA sequence of clone 61220034

[1171] SEQ ID NO:1131 is the determined cDNA sequence of clone 61220035

[1172] SEQ ID NO:1132 is the determined cDNA sequence of clone 61220036

[1173] SEQ ID NO:1133 is the determined cDNA sequence of clone 61220037

[1174] SEQ ID NO:1134 is the determined cDNA sequence of clone 61220038

[1175] SEQ ID NO:1135 is the determined cDNA sequence of clone 61220040

[1176] SEQ ID NO:1136 is the determined cDNA sequence of clone 61220043

[1177] SEQ ID NO:1137 is the determined cDNA sequence of clone 61220044

[1178] SEQ ID NO:1138 is the determined cDNA sequence of clone 61220045

[1179] SEQ ID NO:1139 is the determined cDNA sequence of clone 61220046

[1180] SEQ ID NO:1140 is the determined cDNA sequence of clone 61220051

[1181] SEQ ID NO:1141 is the determined cDNA sequence of clone 61220052

[1182] SEQ ID NO:1142 is the determined cDNA sequence of clone 61220053

[1183] SEQ ID NO:1143 is the determined cDNA sequence of clone 61220054

[1184] SEQ ID NO:1144 is the determined cDNA sequence of clone 61220055

[1185] SEQ ID NO:1145 is the determined cDNA sequence of clone 61546633

[1186] SEQ ID NO:1146 is the determined cDNA sequence of clone 61546634

[1187] SEQ ID NO:1147 is the determined cDNA sequence of clone 61546635

[1188] SEQ ID NO:1148 is the determined cDNA sequence of clone 61546636

[1189] SEQ ID NO:1149 is the determined cDNA sequence of clone 61546637

[1190] SEQ ID NO:1150 is the determined cDNA sequence of clone 61546639

[1191] SEQ ID NO:1151 is the determined cDNA sequence of clone 61546642

[1192] SEQ ID NO:1152 is the determined cDNA sequence of clone 61546643

[1193] SEQ ID NO:1153 is the determined cDNA sequence of clone 61546644

[1194] SEQ ID NO:1154 is the determined cDNA sequence of clone 61546645

[1195] SEQ ID NO:1155 is the determined cDNA sequence of clone 61546646

[1196] SEQ ID NO:1156 is the determined cDNA sequence of clone 61546647

[1197] SEQ ID NO:1157 is the determined cDNA sequence of clone 61546648

[1198] SEQ ID NO:1158 is the determined cDNA sequence of clone 61546649

[1199] SEQ ID NO:1159 is the determined cDNA sequence of clone 61546650

[1200] SEQ ID NO:1160 is the determined cDNA sequence of clone 61546651

[1201] SEQ ID NO:1161 is the determined cDNA sequence of clone 61546652

[1202] SEQ ID NO:1162 is the determined cDNA sequence of clone 61546653

[1203] SEQ ID NO:1163 is the determined cDNA sequence of clone 61546654

[1204] SEQ ID NO:1164 is the determined cDNA sequence of clone 61546656

[1205] SEQ ID NO:1165 is the determined cDNA sequence of clone 61546657

[1206] SEQ ID NO:1166 is the determined cDNA sequence of clone 61546658

[1207] SEQ ID NO:1167 is the determined cDNA sequence of clone 61546659

[1208] SEQ ID NO:1168 is the determined cDNA sequence of clone 61546660

[1209] SEQ ID NO:1169 is the determined cDNA sequence of clone 61546661

[1210] SEQ ID NO:1170 is the determined cDNA sequence of clone 61546662

[1211] SEQ ID NO:1171 is the determined cDNA sequence of clone 61546663

[1212] SEQ ID NO:1172 is the determined cDNA sequence of clone 61546664

[1213] SEQ ID NO:1173 is the determined cDNA sequence of clone 61546665

[1214] SEQ ID NO:1174 is the determined cDNA sequence of clone 61546667

[1215] SEQ ID NO:1175 is the determined cDNA sequence of clone 61546668

[1216] SEQ ID NO:1176 is the determined cDNA sequence of clone 61546669

[1217] SEQ ID NO:1177 is the determined cDNA sequence of clone 61546670

[1218] SEQ ID NO:1178 is the determined cDNA sequence of clone 61546671

[1219] SEQ ID NO:1179 is the determined cDNA sequence of clone 61546672

[1220] SEQ ID NO:1180 is the determined cDNA sequence of clone 61546674

[1221] SEQ ID NO:1181 is the determined cDNA sequence of clone 61546675

[1222] SEQ ID NO:1182 is the determined cDNA sequence of clone 61546676

[1223] SEQ ID NO:1183 is the determined cDNA sequence of clone 61546677

[1224] SEQ ID NO:1184 is the determined cDNA sequence of clone 61546679

[1225] SEQ ID NO:1185 is the determined cDNA sequence of clone 61546680

[1226] SEQ ID NO:1186 is the determined cDNA sequence of clone 61546682

[1227] SEQ ID NO:1187 is the determined cDNA sequence of clone 61546683

[1228] SEQ ID NO:1188 is the determined cDNA sequence of clone 61546684

[1229] SEQ ID NO:1189 is the determined cDNA sequence of clone 61546685

[1230] SEQ ID NO:1190 is the determined cDNA sequence of clone 61546686

[1231] SEQ ID NO:1191 is the determined cDNA sequence of clone 61546687

[1232] SEQ ID NO:1192 is the determined cDNA sequence of clone 61546688

[1233] SEQ ID NO:1193 is the determined cDNA sequence of clone 61546689

[1234] SEQ ID NO:1194 is the determined cDNA sequence of clone 61546690

[1235] SEQ ID NO:1195 is the determined cDNA sequence of clone 61546691

[1236] SEQ ID NO:1196 is the determined cDNA sequence of clone 61546692

[1237] SEQ ID NO:1197 is the determined cDNA sequence of clone 61546693

[1238] SEQ ID NO:1198 is the determined cDNA sequence of clone 61546694

[1239] SEQ ID NO:1199 is the determined cDNA sequence of clone 61546695

[1240] SEQ ID NO:1200 is the determined cDNA sequence of clone 61546697

[1241] SEQ ID NO:1201 is the determined cDNA sequence of clone 61546698

[1242] SEQ ID NO:1202 is the determined cDNA sequence of clone 61546699

[1243] SEQ ID NO:1203 is the determined cDNA sequence of clone 61546700

[1244] SEQ ID NO:1204 is the determined cDNA sequence of clone 61546701

[1245] SEQ ID NO:1205 is the determined cDNA sequence of clone 61546702

[1246] SEQ ID NO:1206 is the determined cDNA sequence of clone 61546703

[1247] SEQ ID NO:1207 is the determined cDNA sequence of clone 61546704

[1248] SEQ ID NO:1208 is the determined cDNA sequence of clone 61546705

[1249] SEQ ID NO:1209 is the determined cDNA sequence of clone 61546706

[1250] SEQ ID NO:1210 is the determined cDNA sequence of clone 61546707

[1251] SEQ ID NO:1211 is the determined cDNA sequence of clone 61546708

[1252] SEQ ID NO:1212 is the determined cDNA sequence of clone 61546709

[1253] SEQ ID NO:1213 is the determined cDNA sequence of clone 61546710

[1254] SEQ ID NO:1214 is the determined cDNA sequence of clone 61546711

[1255] SEQ ID NO:1215 is the determined cDNA sequence of clone 61546712

[1256] SEQ ID NO:1216 is the determined cDNA sequence of clone 61546714

[1257] SEQ ID NO:1217 is the determined cDNA sequence of clone 61546716

[1258] SEQ ID NO:1218 is the determined cDNA sequence of clone 61546718

[1259] SEQ ID NO:1219 is the determined cDNA sequence of clone 61546719

[1260] SEQ ID NO:1220 is the determined cDNA sequence of clone 61546720

[1261] SEQ ID NO:1221 is the determined cDNA sequence of clone 61546722

[1262] SEQ ID NO:1222 is the determined cDNA sequence of clone 61546724

[1263] SEQ ID NO:1223 is the determined cDNA sequence of clone 61220428

[1264] SEQ ID NO:1224 is the determined cDNA sequence of clone 61220430

[1265] SEQ ID NO:1225 is the determined cDNA sequence of clone 61220431

[1266] SEQ ID NO:1226 is the determined cDNA sequence of clone 61220432

[1267] SEQ ID NO:1227 is the determined cDNA sequence of clone 61220433

[1268] SEQ ID NO:1228 is the determined cDNA sequence of clone 61220434

[1269] SEQ ID NO:1229 is the determined cDNA sequence of clone 61220435

[1270] SEQ ID NO:1230 is the determined cDNA sequence of clone 61220436

[1271] SEQ ID NO:1231 is the determined cDNA sequence of clone 61220437

[1272] SEQ ID NO:1232 is the determined cDNA sequence of clone 61220439

[1273] SEQ ID NO:1233 is the determined cDNA sequence of clone 61220440

[1274] SEQ ID NO:1234 is the determined cDNA sequence of clone 61220441

[1275] SEQ ID NO:1235 is the determined cDNA sequence of clone 61220442

[1276] SEQ ID NO:1236 is the determined cDNA sequence of clone 61220443

[1277] SEQ ID NO:1237 is the determined cDNA sequence of clone 61220444

[1278] SEQ ID NO:1238 is the determined cDNA sequence of clone 61220445

[1279] SEQ ID NO:1239 is the determined cDNA sequence of clone 61220446

[1280] SEQ ID NO:1240 is the determined cDNA sequence of clone 61220447

[1281] SEQ ID NO:1241 is the determined cDNA sequence of clone 61220448

[1282] SEQ ID NO:1242 is the determined cDNA sequence of clone 61220452

[1283] SEQ ID NO:1243 is the determined cDNA sequence of clone 61220453

[1284] SEQ ID NO:1244 is the determined cDNA sequence of clone 61220454

[1285] SEQ ID NO:1245 is the determined cDNA sequence of clone 61220455

[1286] SEQ ID NO:1246 is the determined cDNA sequence of clone 61220456

[1287] SEQ ID NO:1247 is the determined cDNA sequence of clone 61220457

[1288] SEQ ID NO:1248 is the determined cDNA sequence of clone 61220458

[1289] SEQ ID NO:1249 is the determined cDNA sequence of clone 61220459

[1290] SEQ ID NO:1250 is the determined cDNA sequence of clone 61220460

[1291] SEQ ID NO:1251 is the determined cDNA sequence of clone 61220461

[1292] SEQ ID NO:1252 is the determined cDNA sequence of clone 61220462

[1293] SEQ ID NO:1253 is the determined cDNA sequence of clone 61220464

[1294] SEQ ID NO:1254 is the determined cDNA sequence of clone 61220465

[1295] SEQ ID NO:1255 is the determined cDNA sequence of clone 61220466

[1296] SEQ ID NO:1256 is the determined cDNA sequence of clone 61220467

[1297] SEQ ID NO:1257 is the determined cDNA sequence of clone 61220468

[1298] SEQ ID NO:1258 is the determined cDNA sequence of clone 61220469

[1299] SEQ ID NO:1259 is the determined cDNA sequence of clone 61220470

[1300] SEQ ID NO:1260 is the determined cDNA sequence of clone 61220471

[1301] SEQ ID NO:1261 is the determined cDNA sequence of clone 61220473

[1302] SEQ ID NO:1262 is the determined cDNA sequence of clone 61220474

[1303] SEQ ID NO:1263 is the determined cDNA sequence of clone 61220475

[1304] SEQ ID NO:1264 is the determined cDNA sequence of clone 61220476

[1305] SEQ ID NO:1265 is the determined cDNA sequence of clone 61220477

[1306] SEQ ID NO:1266 is the determined cDNA sequence of clone 61220478

[1307] SEQ ID NO:1267 is the determined cDNA sequence of clone 61220480

[1308] SEQ ID NO:1268 is the determined cDNA sequence of clone 61220481

[1309] SEQ ID NO:1269 is the determined cDNA sequence of clone 61220482

[1310] SEQ ID NO:1270 is the determined cDNA sequence of clone 61220483

[1311] SEQ ID NO:1271 is the determined cDNA sequence of clone 61220484

[1312] SEQ ID NO:1272 is the determined cDNA sequence of clone 61220485

[1313] SEQ ID NO:1273 is the determined cDNA sequence of clone 61220486

[1314] SEQ ID NO:1274 is the determined cDNA sequence of clone 61220487

[1315] SEQ ID NO:1275 is the determined cDNA sequence of clone 61220488

[1316] SEQ ID NO:1276 is the determined cDNA sequence of clone 61220489

[1317] SEQ ID NO:1277 is the determined cDNA sequence of clone 61220490

[1318] SEQ ID NO:1278 is the determined cDNA sequence of clone 61220491

[1319] SEQ ID NO:1279 is the determined cDNA sequence of clone 61220492

[1320] SEQ ID NO:1280 is the determined cDNA sequence of clone 61220493

[1321] SEQ ID NO:1281 is the determined cDNA sequence of clone 61220494

[1322] SEQ ID NO:1282 is the determined cDNA sequence of clone 61220495

[1323] SEQ ID NO:1283 is the determined cDNA sequence of clone 61220496

[1324] SEQ ID NO:1284 is the determined cDNA sequence of clone 61220497

[1325] SEQ ID NO:1285 is the determined cDNA sequence of clone 61220498

[1326] SEQ ID NO:1286 is the determined cDNA sequence of clone 61220499

[1327] SEQ ID NO:1287 is the determined cDNA sequence of clone 61220500

[1328] SEQ ID NO:1288 is the determined cDNA sequence of clone 61220501

[1329] SEQ ID NO:1289 is the determined cDNA sequence of clone 61220502

[1330] SEQ ID NO:1290 is the determined cDNA sequence of clone 61220503

[1331] SEQ ID NO:1291 is the determined cDNA sequence of clone 61220504

[1332] SEQ ID NO:1292 is the determined cDNA sequence of clone 61220505

[1333] SEQ ID NO:1293 is the determined cDNA sequence of clone 61220506

[1334] SEQ ID NO:1294 is the determined cDNA sequence of clone 61220507

[1335] SEQ ID NO:1295 is the determined cDNA sequence of clone 61220508

[1336] SEQ ID NO:1296 is the determined cDNA sequence of clone 61220509

[1337] SEQ ID NO:1297 is the determined cDNA sequence of clone 61220511

[1338] SEQ ID NO:1298 is the determined cDNA sequence of clone 61220512

[1339] SEQ ID NO:1299 is the determined cDNA sequence of clone 61220513

[1340] SEQ ID NO:1300 is the determined cDNA sequence of clone 61220514

[1341] SEQ ID NO:1301 is the determined cDNA sequence of clone 61220515

[1342] SEQ ID NO:1302 is the determined cDNA sequence of clone 61220516

[1343] SEQ ID NO:1303 is the determined cDNA sequence of clone 61220517

[1344] SEQ ID NO:1304 is the determined cDNA sequence of clone 61220518

[1345] SEQ ID NO:1305 is the determined cDNA sequence of clone 61220519

[1346] SEQ ID NO:1306 is the determined cDNA sequence of clone 61220520

[1347] SEQ ID NO:1307 is the determined cDNA sequence of clone 61547443

[1348] SEQ ID NO:1308 is the determined cDNA sequence of clone 61547444

[1349] SEQ ID NO:1309 is the determined cDNA sequence of clone 61547445

[1350] SEQ ID NO:1310 is the determined cDNA sequence of clone 61547446

[1351] SEQ ID NO:1311 is the determined cDNA sequence of clone 61547447

[1352] SEQ ID NO:1312 is the determined cDNA sequence of clone 61547448

[1353] SEQ ID NO:1313 is the determined cDNA sequence of clone 61547449

[1354] SEQ ID NO:1314 is the determined cDNA sequence of clone 61547451

[1355] SEQ ID NO:1315 is the determined cDNA sequence of clone 61547452

[1356] SEQ ID NO:1316 is the determined cDNA sequence of clone 61547453

[1357] SEQ ID NO:1317 is the determined cDNA sequence of clone 61547454

[1358] SEQ ID NO:1318 is the determined cDNA sequence of clone 61547455

[1359] SEQ ID NO:1319 is the determined cDNA sequence of clone 61547456

[1360] SEQ ID NO:1320 is the determined cDNA sequence of clone 61547457

[1361] SEQ ID NO:1321 is the determined cDNA sequence of clone 61547458

[1362] SEQ ID NO:1322 is the determined cDNA sequence of clone 61547459

[1363] SEQ ID NO:1323 is the determined cDNA sequence of clone 61547460

[1364] SEQ ID NO:1324 is the determined cDNA sequence of clone 61547461

[1365] SEQ ID NO:1325 is the determined cDNA sequence of clone 61547462

[1366] SEQ ID NO:1326 is the determined cDNA sequence of clone 61547463

[1367] SEQ ID NO:1327 is the determined cDNA sequence of clone 61547464

[1368] SEQ ID NO:1328 is the determined cDNA sequence of clone 61547465

[1369] SEQ ID NO:1329 is the determined cDNA sequence of clone 61547466

[1370] SEQ ID NO:1330 is the determined cDNA sequence of clone 61547467

[1371] SEQ ID NO:1331 is the determined cDNA sequence of clone 61547468

[1372] SEQ ID NO:1332 is the determined cDNA sequence of clone 61547469

[1373] SEQ ID NO:1333 is the determined cDNA sequence of clone 61547470

[1374] SEQ ID NO:1334 is the determined cDNA sequence of clone 61547471

[1375] SEQ ID NO:1335 is the determined cDNA sequence of clone 61547472

[1376] SEQ ID NO:1336 is the determined cDNA sequence of clone 61547473

[1377] SEQ ID NO:1337 is the determined cDNA sequence of clone 61547474

[1378] SEQ ID NO:1338 is the determined cDNA sequence of clone 61547475

[1379] SEQ ID NO:1339 is the determined cDNA sequence of clone 61547476

[1380] SEQ ID NO:1340 is the determined cDNA sequence of clone 61547477

[1381] SEQ ID NO:1341 is the determined cDNA sequence of clone 61547478

[1382] SEQ ID NO:1342 is the determined cDNA sequence of clone 61547479

[1383] SEQ ID NO:1343 is the determined cDNA sequence of clone 61547480

[1384] SEQ ID NO:1344 is the determined cDNA sequence of clone 61547481

[1385] SEQ ID NO:1345 is the determined cDNA sequence of clone 61547483

[1386] SEQ ID NO:1346 is the determined cDNA sequence of clone 61547484

[1387] SEQ ID NO:1347 is the determined cDNA sequence of clone 61547485

[1388] SEQ ID NO:1348 is the determined cDNA sequence of clone 61547486

[1389] SEQ ID NO:1349 is the determined cDNA sequence of clone 61547487

[1390] SEQ ID NO:1350 is the determined cDNA sequence of clone 61547488

[1391] SEQ ID NO:1351 is the determined cDNA sequence of clone 61547489

[1392] SEQ ID NO:1352 is the determined cDNA sequence of clone 61547490

[1393] SEQ ID NO:1353 is the determined cDNA sequence of clone 61547491

[1394] SEQ ID NO:1354 is the determined cDNA sequence of clone 61547492

[1395] SEQ ID NO:1355 is the determined cDNA sequence of clone 61547494

[1396] SEQ ID NO:1356 is the determined cDNA sequence of clone 61547495

[1397] SEQ ID NO:1357 is the determined cDNA sequence of clone 61547498

[1398] SEQ ID NO:1358 is the determined cDNA sequence of clone 61547499

[1399] SEQ ID NO:1359 is the determined cDNA sequence of clone 61547500

[1400] SEQ ID NO:1360 is the determined cDNA sequence of clone 61547501

[1401] SEQ ID NO:1361 is the determined cDNA sequence of clone 61547502

[1402] SEQ ID NO:1362 is the determined cDNA sequence of clone 61547503

[1403] SEQ ID NO:1363 is the determined cDNA sequence of clone 61547504

[1404] SEQ ID NO:1364 is the determined cDNA sequence of clone 61547505

[1405] SEQ ID NO:1365 is the determined cDNA sequence of clone 61547507

[1406] SEQ ID NO:1366 is the determined cDNA sequence of clone 61547508

[1407] SEQ ID NO:1367 is the determined cDNA sequence of clone 61547509

[1408] SEQ ID NO:1368 is the determined cDNA sequence of clone 61547510

[1409] SEQ ID NO:1369 is the determined cDNA sequence of clone 61547511

[1410] SEQ ID NO:1370 is the determined cDNA sequence of clone 61547512

[1411] SEQ ID NO:1371 is the determined cDNA sequence of clone 61547513

[1412] SEQ ID NO:1372 is the determined cDNA sequence of clone 61547514

[1413] SEQ ID NO:1373 is the determined cDNA sequence of clone 61547515

[1414] SEQ ID NO:1374 is the determined cDNA sequence of clone 61547516

[1415] SEQ ID NO:1375 is the determined cDNA sequence of clone 61547517

[1416] SEQ ID NO:1376 is the determined cDNA sequence of clone 61547518

[1417] SEQ ID NO:1377 is the determined cDNA sequence of clone 61547519

[1418] SEQ ID NO:1378 is the determined cDNA sequence of clone 61547520

[1419] SEQ ID NO:1379 is the determined cDNA sequence of clone 61547522

[1420] SEQ ID NO:1380 is the determined cDNA sequence of clone 61547523

[1421] SEQ ID NO:1381 is the determined cDNA sequence of clone 61547524

[1422] SEQ ID NO:1382 is the determined cDNA sequence of clone 61547525

[1423] SEQ ID NO:1383 is the determined cDNA sequence of clone 61547526

[1424] SEQ ID NO:1384 is the determined cDNA sequence of clone 61547527

[1425] SEQ ID NO:1385 is the determined cDNA sequence of clone 61547528

[1426] SEQ ID NO:1386 is the determined cDNA sequence of clone 61547529

[1427] SEQ ID NO:1387 is the determined cDNA sequence of clone 61547530

[1428] SEQ ID NO:1388 is the determined cDNA sequence of clone 61547532

[1429] SEQ ID NO:1389 is the determined cDNA sequence of clone 61547533

[1430] SEQ ID NO:1390 is the determined cDNA sequence of clone 61547534

[1431] SEQ ID NO:1391 is the determined cDNA sequence of clone 61547535

[1432] SEQ ID NO:1392 is the determined cDNA sequence of clone 61438573

[1433] SEQ ID NO:1393 is the determined cDNA sequence of clone 61438574

[1434] SEQ ID NO:1394 is the determined cDNA sequence of clone 61438575

[1435] SEQ ID NO:1395 is the determined cDNA sequence of clone 61438576

[1436] SEQ ID NO:1396 is the determined cDNA sequence of clone 61438577

[1437] SEQ ID NO:1397 is the determined cDNA sequence of clone 61438579

[1438] SEQ ID NO:1398 is the determined cDNA sequence of clone 61438581

[1439] SEQ ID NO:1399 is the determined cDNA sequence of clone 61438582

[1440] SEQ ID NO:1400 is the determined cDNA sequence of clone 61438583

[1441] SEQ ID NO:1401 is the determined cDNA sequence of clone 61438584

[1442] SEQ ID NO:1402 is the determined cDNA sequence of clone 61438585

[1443] SEQ ID NO:1403 is the determined cDNA sequence of clone 61438586

[1444] SEQ ID NO:1404 is the determined cDNA sequence of clone 61438588

[1445] SEQ ID NO:1405 is the determined cDNA sequence of clone 61438589

[1446] SEQ ID NO:1406 is the determined cDNA sequence of clone 61438590

[1447] SEQ ID NO:1407 is the determined cDNA sequence of clone 61438591

[1448] SEQ ID NO:1408 is the determined cDNA sequence of clone 61438592

[1449] SEQ ID NO:1409 is the determined cDNA sequence of clone 61438593

[1450] SEQ ID NO:1410 is the determined cDNA sequence of clone 61438594

[1451] SEQ ID NO:1411 is the determined cDNA sequence of clone 61438595

[1452] SEQ ID NO:1412 is the determined cDNA sequence of clone 61438596

[1453] SEQ ID NO:1413 is the determined cDNA sequence of clone 61438597

[1454] SEQ ID NO:1414 is the determined cDNA sequence of clone 61438598

[1455] SEQ ID NO:1415 is the determined cDNA sequence of clone 61438599

[1456] SEQ ID NO:1416 is the determined cDNA sequence of clone 61438600

[1457] SEQ ID NO:1417 is the determined cDNA sequence of clone 61438601

[1458] SEQ ID NO:1418 is the determined cDNA sequence of clone 61438602

[1459] SEQ ID NO:1419 is the determined cDNA sequence of clone 61438603

[1460] SEQ ID NO:1420 is the determined cDNA sequence of clone 61438604

[1461] SEQ ID NO:1421 is the determined cDNA sequence of clone 61438607

[1462] SEQ ID NO:1422 is the determined cDNA sequence of clone 61438608

[1463] SEQ ID NO:1423 is the determined cDNA sequence of clone 61438609

[1464] SEQ ID NO:1424 is the determined cDNA sequence of clone 61438610

[1465] SEQ ID NO:1425 is the determined cDNA sequence of clone 61438611

[1466] SEQ ID NO:1426 is the determined cDNA sequence of clone 61438612

[1467] SEQ ID NO:1427 is the determined cDNA sequence of clone 61438613

[1468] SEQ ID NO:1428 is the determined cDNA sequence of clone 61438615

[1469] SEQ ID NO:1429 is the determined cDNA sequence of clone 61438616

[1470] SEQ ID NO:1430 is the determined cDNA sequence of clone 61438617

[1471] SEQ ID NO:1431 is the determined cDNA sequence of clone 61438618

[1472] SEQ ID NO:1432 is the determined cDNA sequence of clone 61438620

[1473] SEQ ID NO:1433 is the determined cDNA sequence of clone 61438621

[1474] SEQ ID NO:1434 is the determined cDNA sequence of clone 61438622

[1475] SEQ ID NO:1435 is the determined cDNA sequence of clone 61438623

[1476] SEQ ID NO:1436 is the determined cDNA sequence of clone 61438624

[1477] SEQ ID NO:1437 is the determined cDNA sequence of clone 61438625

[1478] SEQ ID NO:1438 is the determined cDNA sequence of clone 61438626

[1479] SEQ ID NO:1439 is the determined cDNA sequence of clone 61438627

[1480] SEQ ID NO:1440 is the determined cDNA sequence of clone 61438629

[1481] SEQ ID NO:1441 is the determined cDNA sequence of clone 61438630

[1482] SEQ ID NO:1442 is the determined cDNA sequence of clone 61438631

[1483] SEQ ID NO:1443 is the determined cDNA sequence of clone 61438632

[1484] SEQ ID NO:1444 is the determined cDNA sequence of clone 61438633

[1485] SEQ ID NO:1445 is the determined cDNA sequence of clone 61438634

[1486] SEQ ID NO:1446 is the determined cDNA sequence of clone 61438635

[1487] SEQ ID NO:1447 is the determined cDNA sequence of clone 61438637

[1488] SEQ ID NO:1448 is the determined cDNA sequence of clone 61438638

[1489] SEQ ID NO:1449 is the determined cDNA sequence of clone 61438639

[1490] SEQ ID NO:1450 is the determined cDNA sequence of clone 61438640

[1491] SEQ ID NO:1451 is the determined cDNA sequence of clone 61438641

[1492] SEQ ID NO:1452 is the determined cDNA sequence of clone 61438642

[1493] SEQ ID NO:1453 is the determined cDNA sequence of clone 61438643

[1494] SEQ ID NO:1454 is the determined cDNA sequence of clone 61438644

[1495] SEQ ID NO:1455 is the determined cDNA sequence of clone 61438645

[1496] SEQ ID NO:1456 is the determined cDNA sequence of clone 61438646

[1497] SEQ ID NO:1457 is the determined cDNA sequence of clone 61438647

[1498] SEQ ID NO:1458 is the determined cDNA sequence of clone 61438648

[1499] SEQ ID NO:1459 is the determined cDNA sequence of clone 61438649

[1500] SEQ ID NO:1460 is the determined cDNA sequence of clone 61438650

[1501] SEQ ID NO:1461 is the determined cDNA sequence of clone 61438651

[1502] SEQ ID NO:1462 is the determined cDNA sequence of clone 61438652

[1503] SEQ ID NO:1463 is the determined cDNA sequence of clone 61438653

[1504] SEQ ID NO:1464 is the determined cDNA sequence of clone 61438654

[1505] SEQ ID NO:1465 is the determined cDNA sequence of clone 61438655

[1506] SEQ ID NO:1466 is the determined cDNA sequence of clone 61438656

[1507] SEQ ID NO:1467 is the determined cDNA sequence of clone 61438657

[1508] SEQ ID NO:1468 is the determined cDNA sequence of clone 61438658

[1509] SEQ ID NO:1469 is the determined cDNA sequence of clone 61438659

[1510] SEQ ID NO:1470 is the determined cDNA sequence of clone 61438660

[1511] SEQ ID NO:1471 is the determined cDNA sequence of clone 61438661

[1512] SEQ ID NO:1472 is the determined cDNA sequence of clone 61438662

[1513] SEQ ID NO:1473 is the determined cDNA sequence of clone 61438663

[1514] SEQ ID NO:1474 is the determined cDNA sequence of clone 61438664

[1515] SEQ ID NO:1475 is the determined cDNA sequence of clone 61438665

[1516] SEQ ID NO:1476 is the determined cDNA sequence of clone 61165980

[1517] SEQ ID NO:1477 is the determined cDNA sequence of clone 61165981

[1518] SEQ ID NO:1478 is the determined cDNA sequence of clone 61165982

[1519] SEQ ID NO:1479 is the determined cDNA sequence of clone 61165983

[1520] SEQ ID NO:1480 is the determined cDNA sequence of clone 61165984

[1521] SEQ ID NO:1481 is the determined cDNA sequence of clone 61165985

[1522] SEQ ID NO:1482 is the determined cDNA sequence of clone 61165986

[1523] SEQ ID NO:1483 is the determined cDNA sequence of clone 61165987

[1524] SEQ ID NO:1484 is the determined cDNA sequence of clone 61165988

[1525] SEQ ID NO:1485 is the determined cDNA sequence of clone 61165989

[1526] SEQ ID NO:1486 is the determined cDNA sequence of clone 61165990

[1527] SEQ ID NO:1487 is the determined cDNA sequence of clone 61165991

[1528] SEQ ID NO:1488 is the determined cDNA sequence of clone 61165992

[1529] SEQ ID NO:1489 is the determined cDNA sequence of clone 61165994

[1530] SEQ ID NO:1490 is the determined cDNA sequence of clone 61165995

[1531] SEQ ID NO:1491 is the determined cDNA sequence of clone 61165996

[1532] SEQ ID NO:1492 is the determined cDNA sequence of clone 61165997

[1533] SEQ ID NO:1493 is the determined cDNA sequence of clone 61165998

[1534] SEQ ID NO:1494 is the determined cDNA sequence of clone 61165999

[1535] SEQ ID NO:1495 is the determined cDNA sequence of clone 61166001

[1536] SEQ ID NO:1496 is the determined cDNA sequence of clone 61166002

[1537] SEQ ID NO:1497 is the determined cDNA sequence of clone 61166003

[1538] SEQ ID NO:1498 is the determined cDNA sequence of clone 61166004

[1539] SEQ ID NO:1499 is the determined cDNA sequence of clone 61166005

[1540] SEQ ID NO:1500 is the determined cDNA sequence of clone 61166006

[1541] SEQ ID NO:1501 is the determined cDNA sequence of clone 61166007

[1542] SEQ ID NO:1502 is the determined cDNA sequence of clone 61166008

[1543] SEQ ID NO:1503 is the determined cDNA sequence of clone 61166009

[1544] SEQ ID NO:1504 is the determined cDNA sequence of clone 61166010

[1545] SEQ ID NO:1505 is the determined cDNA sequence of clone 61166012

[1546] SEQ ID NO:1506 is the determined cDNA sequence of clone 61166014

[1547] SEQ ID NO:1507 is the determined cDNA sequence of clone 61166015

[1548] SEQ ID NO:1508 is the determined cDNA sequence of clone 61166016

[1549] SEQ ID NO:1509 is the determined cDNA sequence of clone 61166017

[1550] SEQ ID NO:1510 is the determined cDNA sequence of clone 61166018

[1551] SEQ ID NO:1511 is the determined cDNA sequence of clone 61166019

[1552] SEQ ID NO:1512 is the determined cDNA sequence of clone 61166020

[1553] SEQ ID NO:1513 is the determined cDNA sequence of clone 61166021

[1554] SEQ ID NO:1514 is the determined cDNA sequence of clone 61166022

[1555] SEQ ID NO:1515 is the determined cDNA sequence of clone 61166023

[1556] SEQ ID NO:1516 is the determined cDNA sequence of clone 61166024

[1557] SEQ ID NO:1517 is the determined cDNA sequence of clone 61166025

[1558] SEQ ID NO:1518 is the determined cDNA sequence of clone 61166027

[1559] SEQ ID NO:1519 is the determined cDNA sequence of clone 61166028

[1560] SEQ ID NO:1520 is the determined cDNA sequence of clone 61166029

[1561] SEQ ID NO:1521 is the determined cDNA sequence of clone 61166030

[1562] SEQ ID NO:1522 is the determined cDNA sequence of clone 61166031

[1563] SEQ ID NO:1523 is the determined cDNA sequence of clone 61166032

[1564] SEQ ID NO:1524 is the determined cDNA sequence of clone 61166033

[1565] SEQ ID NO:1525 is the determined cDNA sequence of clone 61166035

[1566] SEQ ID NO:1526 is the determined cDNA sequence of clone 61166036

[1567] SEQ ID NO:1527 is the determined cDNA sequence of clone 61166039

[1568] SEQ ID NO:1528 is the determined cDNA sequence of clone 61166040

[1569] SEQ ID NO:1529 is the determined cDNA sequence of clone 61166041

[1570] SEQ ID NO:1530 is the determined cDNA sequence of clone 61166042

[1571] SEQ ID NO:1531 is the determined cDNA sequence of clone 61166043

[1572] SEQ ID NO:1532 is the determined cDNA sequence of clone 61166044

[1573] SEQ ID NO:1533 is the determined cDNA sequence of clone 61166045

[1574] SEQ ID NO:1534 is the determined cDNA sequence of clone 61166047

[1575] SEQ ID NO:1535 is the determined cDNA sequence of clone 61166048

[1576] SEQ ID NO:1536 is the determined cDNA sequence of clone 61166049

[1577] SEQ ID NO:1537 is the determined cDNA sequence of clone 61166050

[1578] SEQ ID NO:1538 is the determined cDNA sequence of clone 61166053

[1579] SEQ ID NO:1539 is the determined cDNA sequence of clone 61166054

[1580] SEQ ID NO:1540 is the determined cDNA sequence of clone 61166055

[1581] SEQ ID NO:1541 is the determined cDNA sequence of clone 61166056

[1582] SEQ ID NO:1542 is the determined cDNA sequence of clone 61166057

[1583] SEQ ID NO:1543 is the determined cDNA sequence of clone 61166058

[1584] SEQ ID NO:1544 is the determined cDNA sequence of clone 61166059

[1585] SEQ ID NO:1545 is the determined cDNA sequence of clone 61166060

[1586] SEQ ID NO:1546 is the determined cDNA sequence of clone 61166061

[1587] SEQ ID NO:1547 is the determined cDNA sequence of clone 61166062

[1588] SEQ ID NO:1548 is the determined cDNA sequence of clone 61166064

[1589] SEQ ID NO:1549 is the determined cDNA sequence of clone 61166065

[1590] SEQ ID NO:1550 is the determined cDNA sequence of clone 61166066

[1591] SEQ ID NO:1551 is the determined cDNA sequence of clone 61166067

[1592] SEQ ID NO:1552 is the determined cDNA sequence of clone 61166068

[1593] SEQ ID NO:1553 is the determined cDNA sequence of clone 61166069

[1594] SEQ ID NO:1554 is the determined cDNA sequence of clone 61166071

[1595] SEQ ID NO:1555 is the determined cDNA sequence of clone 61559232

[1596] SEQ ID NO:1556 is the determined cDNA sequence of clone 61559233

[1597] SEQ ID NO:1557 is the determined cDNA sequence of clone 61559234

[1598] SEQ ID NO:1558 is the determined cDNA sequence of clone 61559235

[1599] SEQ ID NO:1559 is the determined cDNA sequence of clone 61559236

[1600] SEQ ID NO:1560 is the determined cDNA sequence of clone 61559237

[1601] SEQ ID NO:1561 is the determined cDNA sequence of clone 61559238

[1602] SEQ ID NO:1562 is the determined cDNA sequence of clone 61559239

[1603] SEQ ID NO:1563 is the determined cDNA sequence of clone 61559240

[1604] SEQ ID NO:1564 is the determined cDNA sequence of clone 61559241

[1605] SEQ ID NO:1565 is the determined cDNA sequence of clone 61559242

[1606] SEQ ID NO:1566 is the determined cDNA sequence of clone 61559243

[1607] SEQ ID NO:1567 is the determined cDNA sequence of clone 61559244

[1608] SEQ ID NO:1568 is the determined cDNA sequence of clone 61559246

[1609] SEQ ID NO:1569 is the determined cDNA sequence of clone 61559247

[1610] SEQ ID NO:1570 is the determined cDNA sequence of clone 61559248

[1611] SEQ ID NO:1571 is the determined cDNA sequence of clone 61559249

[1612] SEQ ID NO:1572 is the determined cDNA sequence of clone 61559250

[1613] SEQ ID NO:1573 is the determined cDNA sequence of clone 61559251

[1614] SEQ ID NO:1574 is the determined cDNA sequence of clone 61559254

[1615] SEQ ID NO:1575 is the determined cDNA sequence of clone 61559255

[1616] SEQ ID NO:1576 is the determined cDNA sequence of clone 61559256

[1617] SEQ ID NO:1577 is the determined cDNA sequence of clone 61559257

[1618] SEQ ID NO:1578 is the determined cDNA sequence of clone 61559258

[1619] SEQ ID NO:1579 is the determined cDNA sequence of clone 61559259

[1620] SEQ ID NO:1580 is the determined cDNA sequence of clone 61559260

[1621] SEQ ID NO:1581 is the determined cDNA sequence of clone 61559261

[1622] SEQ ID NO:1582 is the determined cDNA sequence of clone 61559262

[1623] SEQ ID NO:1583 is the determined cDNA sequence of clone 61559263

[1624] SEQ ID NO:1584 is the determined cDNA sequence of clone 61559264

[1625] SEQ ID NO:1585 is the determined cDNA sequence of clone 61559265

[1626] SEQ ID NO:1586 is the determined cDNA sequence of clone 61559266

[1627] SEQ ID NO:1587 is the determined cDNA sequence of clone 61559267

[1628] SEQ ID NO:1588 is the determined cDNA sequence of clone 61559268

[1629] SEQ ID NO:1589 is the determined cDNA sequence of clone 61559270

[1630] SEQ ID NO:1590 is the determined cDNA sequence of clone 61559271

[1631] SEQ ID NO:1591 is the determined cDNA sequence of clone 61559272

[1632] SEQ ID NO:1592 is the determined cDNA sequence of clone 61559273

[1633] SEQ ID NO:1593 is the determined cDNA sequence of clone 61559274

[1634] SEQ ID NO:1594 is the determined cDNA sequence of clone 61559275

[1635] SEQ ID NO:1595 is the determined cDNA sequence of clone 61559276

[1636] SEQ ID NO:1596 is the determined cDNA sequence of clone 61559277

[1637] SEQ ID NO:1597 is the determined cDNA sequence of clone 61559278

[1638] SEQ ID NO:1598 is the determined cDNA sequence of clone 61559279

[1639] SEQ ID NO:1599 is the determined cDNA sequence of clone 61559280

[1640] SEQ ID NO:1600 is the determined cDNA sequence of clone 61559281

[1641] SEQ ID NO:1601 is the determined cDNA sequence of clone 61559282

[1642] SEQ ID NO:1602 is the determined cDNA sequence of clone 61559283

[1643] SEQ ID NO:1603 is the determined cDNA sequence of clone 61559284

[1644] SEQ ID NO:1604 is the determined cDNA sequence of clone 61559285

[1645] SEQ ID NO:1605 is the determined cDNA sequence of clone 61559286

[1646] SEQ ID NO:1606 is the determined cDNA sequence of clone 61559287

[1647] SEQ ID NO:1607 is the determined cDNA sequence of clone 61559288

[1648] SEQ ID NO:1608 is the determined cDNA sequence of clone 61559289

[1649] SEQ ID NO:1609 is the determined cDNA sequence of clone 61559290

[1650] SEQ ID NO:1610 is the determined cDNA sequence of clone 61559291

[1651] SEQ ID NO:1611 is the determined cDNA sequence of clone 61559292

[1652] SEQ ID NO:1612 is the determined cDNA sequence of clone 61559293

[1653] SEQ ID NO:1613 is the determined cDNA sequence of clone 61559294

[1654] SEQ ID NO:1614 is the determined cDNA sequence of clone 61559295

[1655] SEQ ID NO:1615 is the determined cDNA sequence of clone 61559296

[1656] SEQ ID NO:1616 is the determined cDNA sequence of clone 61559297

[1657] SEQ ID NO:1617 is the determined cDNA sequence of clone 61559298

[1658] SEQ ID NO:1618 is the determined cDNA sequence of clone 61559299

[1659] SEQ ID NO:1619 is the determined cDNA sequence of clone 61559300

[1660] SEQ ID NO:1620 is the determined cDNA sequence of clone 61559302

[1661] SEQ ID NO:1621 is the determined cDNA sequence of clone 61559303

[1662] SEQ ID NO:1622 is the determined cDNA sequence of clone 61559304

[1663] SEQ ID NO:1623 is the determined cDNA sequence of clone 61559305

[1664] SEQ ID NO:1624 is the determined cDNA sequence of clone 61559306

[1665] SEQ ID NO:1625 is the determined cDNA sequence of clone 61559308

[1666] SEQ ID NO:1626 is the determined cDNA sequence of clone 61559310

[1667] SEQ ID NO:1627 is the determined cDNA sequence of clone 61559311

[1668] SEQ ID NO:1628 is the determined cDNA sequence of clone 61559312

[1669] SEQ ID NO:1629 is the determined cDNA sequence of clone 61559313

[1670] SEQ ID NO:1630 is the determined cDNA sequence of clone 61559314

[1671] SEQ ID NO:1631 is the determined cDNA sequence of clone 61559315

[1672] SEQ ID NO:1632 is the determined cDNA sequence of clone 61559316

[1673] SEQ ID NO:1633 is the determined cDNA sequence of clone 61559318

[1674] SEQ ID NO:1634 is the determined cDNA sequence of clone 61559319

[1675] SEQ ID NO:1635 is the determined cDNA sequence of clone 61559320

[1676] SEQ ID NO:1636 is the determined cDNA sequence of clone 61559321

[1677] SEQ ID NO:1637 is the determined cDNA sequence of clone 61559322

[1678] SEQ ID NO:1638 is the determined cDNA sequence of clone 61559324

[1679] SEQ ID NO:1639 is the determined cDNA sequence of clone 61438387

[1680] SEQ ID NO:1640 is the determined cDNA sequence of clone 61438388

[1681] SEQ ID NO:1641 is the determined cDNA sequence of clone 61438390

[1682] SEQ ID NO:1642 is the determined cDNA sequence of clone 61438391

[1683] SEQ ID NO:1643 is the determined cDNA sequence of clone 61438394

[1684] SEQ ID NO:1644 is the determined cDNA sequence of clone 61438397

[1685] SEQ ID NO:1645 is the determined cDNA sequence of clone 61438398

[1686] SEQ ID NO:1646 is the determined cDNA sequence of clone 61438399

[1687] SEQ ID NO:1647 is the determined cDNA sequence of clone 61438400

[1688] SEQ ID NO:1648 is the determined cDNA sequence of clone 61438401

[1689] SEQ ID NO:1649 is the determined cDNA sequence of clone 61438403

[1690] SEQ ID NO:1650 is the determined cDNA sequence of clone 61438404

[1691] SEQ ID NO:1651 is the determined cDNA sequence of clone 61438405

[1692] SEQ ID NO:1652 is the determined cDNA sequence of clone 61438406

[1693] SEQ ID NO:1653 is the determined cDNA sequence of clone 61438407

[1694] SEQ ID NO:1654 is the determined cDNA sequence of clone 61438408

[1695] SEQ ID NO:1655 is the determined cDNA sequence of clone 61438409

[1696] SEQ ID NO:1656 is the determined cDNA sequence of clone 61438410

[1697] SEQ ID NO:1657 is the determined cDNA sequence of clone 61438411

[1698] SEQ ID NO:1658 is the determined cDNA sequence of clone 61438412

[1699] SEQ ID NO:1659 is the determined cDNA sequence of clone 61438414

[1700] SEQ ID NO:1660 is the determined cDNA sequence of clone 61438415

[1701] SEQ ID NO:1661 is the determined cDNA sequence of clone 61438416

[1702] SEQ ID NO:1662 is the determined cDNA sequence of clone 61438417

[1703] SEQ ID NO:1663 is the determined cDNA sequence of clone 61438418

[1704] SEQ ID NO:1664 is the determined cDNA sequence of clone 61438419

[1705] SEQ ID NO:1665 is the determined cDNA sequence of clone 61438420

[1706] SEQ ID NO:1666 is the determined cDNA sequence of clone 61438421

[1707] SEQ ID NO:1667 is the determined cDNA sequence of clone 61438422

[1708] SEQ ID NO:1668 is the determined cDNA sequence of clone 61438423

[1709] SEQ ID NO:1669 is the determined cDNA sequence of clone 61438424

[1710] SEQ ID NO:1670 is the determined cDNA sequence of clone 61438425

[1711] SEQ ID NO:1671 is the determined cDNA sequence of clone 61438426

[1712] SEQ ID NO:1672 is the determined cDNA sequence of clone 61438427

[1713] SEQ ID NO:1673 is the determined cDNA sequence of clone 61438428

[1714] SEQ ID NO:1674 is the determined cDNA sequence of clone 61438429

[1715] SEQ ID NO:1675 is the determined cDNA sequence of clone 61438430

[1716] SEQ ID NO:1676 is the determined cDNA sequence of clone 61438431

[1717] SEQ ID NO:1677 is the determined cDNA sequence of clone 61438432

[1718] SEQ ID NO:1678 is the determined cDNA sequence of clone 61438435

[1719] SEQ ID NO:1679 is the determined cDNA sequence of clone 61438436

[1720] SEQ ID NO:1680 is the determined cDNA sequence of clone 61438437

[1721] SEQ ID NO:1681 is the determined cDNA sequence of clone 61438438

[1722] SEQ ID NO:1682 is the determined cDNA sequence of clone 61438439

[1723] SEQ ID NO:1683 is the determined cDNA sequence of clone 61438440

[1724] SEQ ID NO:1684 is the determined cDNA sequence of clone 61438441

[1725] SEQ ID NO:1685 is the determined cDNA sequence of clone 61438442

[1726] SEQ ID NO:1686 is the determined cDNA sequence of clone 61438443

[1727] SEQ ID NO:1687 is the determined cDNA sequence of clone 61438444

[1728] SEQ ID NO:1688 is the determined cDNA sequence of clone 61438446

[1729] SEQ ID NO:1689 is the determined cDNA sequence of clone 61438448

[1730] SEQ ID NO:1690 is the determined cDNA sequence of clone 61438449

[1731] SEQ ID NO:1691 is the determined cDNA sequence of clone 61438450

[1732] SEQ ID NO:1692 is the determined cDNA sequence of clone 61438451

[1733] SEQ ID NO:1693 is the determined cDNA sequence of clone 61438452

[1734] SEQ ID NO:1694 is the determined cDNA sequence of clone 61438453

[1735] SEQ ID NO:1695 is the determined cDNA sequence of clone 61438454

[1736] SEQ ID NO:1696 is the determined cDNA sequence of clone 61438455

[1737] SEQ ID NO:1697 is the determined cDNA sequence of clone 61438456

[1738] SEQ ID NO:1698 is the determined cDNA sequence of clone 61438458

[1739] SEQ ID NO:1699 is the determined cDNA sequence of clone 61438459

[1740] SEQ ID NO:1700 is the determined cDNA sequence of clone 61438463

[1741] SEQ ID NO:1701 is the determined cDNA sequence of clone 61438465

[1742] SEQ ID NO:1702 is the determined cDNA sequence of clone 61438466

[1743] SEQ ID NO:1703 is the determined cDNA sequence of clone 61438467

[1744] SEQ ID NO:1704 is the determined cDNA sequence of clone 61438468

[1745] SEQ ID NO:1705 is the determined cDNA sequence of clone 61438469

[1746] SEQ ID NO:1706 is the determined cDNA sequence of clone 61438470

[1747] SEQ ID NO:1707 is the determined cDNA sequence of clone 61438471

[1748] SEQ ID NO:1708 is the determined cDNA sequence of clone 61438472

[1749] SEQ ID NO:1709 is the determined cDNA sequence of clone 61438474

[1750] SEQ ID NO:1710 is the determined cDNA sequence of clone 61438475

[1751] SEQ ID NO:1711 is the determined cDNA sequence of clone 61438476

[1752] SEQ ID NO:1712 is the determined cDNA sequence of clone 61438478

[1753] SEQ ID NO:1713 is the determined cDNA sequence of clone 61438479

[1754] SEQ ID NO:1714 is the determined cDNA sequence of clone 61524872

[1755] SEQ ID NO:1715 is the determined cDNA sequence of clone 61524873

[1756] SEQ ID NO:1716 is the determined cDNA sequence of clone 61524874

[1757] SEQ ID NO:1717 is the determined cDNA sequence of clone 61524876

[1758] SEQ ID NO:1718 is the determined cDNA sequence of clone 61524877

[1759] SEQ ID NO:1719 is the determined cDNA sequence of clone 61524878

[1760] SEQ ID NO:1720 is the determined cDNA sequence of clone 61524879

[1761] SEQ ID NO:1721 is the determined cDNA sequence of clone 61524880

[1762] SEQ ID NO:1722 is the determined cDNA sequence of clone 61524881

[1763] SEQ ID NO:1723 is the determined cDNA sequence of clone 61524882

[1764] SEQ ID NO:1724 is the determined cDNA sequence of clone 61524883

[1765] SEQ ID NO:1725 is the determined cDNA sequence of clone 61524884

[1766] SEQ ID NO:1726 is the determined cDNA sequence of clone 61524886

[1767] SEQ ID NO:1727 is the determined cDNA sequence of clone 61524887

[1768] SEQ ID NO:1728 is the determined cDNA sequence of clone 61524888

[1769] SEQ ID NO:1729 is the determined cDNA sequence of clone 61524889

[1770] SEQ ID NO:1730 is the determined cDNA sequence of clone 61524890

[1771] SEQ ID NO:1731 is the determined cDNA sequence of clone 61524891

[1772] SEQ ID NO:1732 is the determined cDNA sequence of clone 61524892

[1773] SEQ ID NO:1733 is the determined cDNA sequence of clone 61524893

[1774] SEQ ID NO:1734 is the determined cDNA sequence of clone 61524894

[1775] SEQ ID NO:1735 is the determined cDNA sequence of clone 61524895

[1776] SEQ ID NO:1736 is the determined cDNA sequence of clone 61524897

[1777] SEQ ID NO:1737 is the determined cDNA sequence of clone 61524898

[1778] SEQ ID NO:1738 is the determined cDNA sequence of clone 61524899

[1779] SEQ ID NO:1739 is the determined cDNA sequence of clone 61524901

[1780] SEQ ID NO:1740 is the determined cDNA sequence of clone 61524902

[1781] SEQ ID NO:1741 is the determined cDNA sequence of clone 61524903

[1782] SEQ ID NO:1742 is the determined cDNA sequence of clone 61524904

[1783] SEQ ID NO:1743 is the determined cDNA sequence of clone 61524905

[1784] SEQ ID NO:1744 is the determined cDNA sequence of clone 61524906

[1785] SEQ ID NO:1745 is the determined cDNA sequence of clone 61524908

[1786] SEQ ID NO:1746 is the determined cDNA sequence of clone 61524909

[1787] SEQ ID NO:1747 is the determined cDNA sequence of clone 61524910

[1788] SEQ ID NO:1748 is the determined cDNA sequence of clone 61524912

[1789] SEQ ID NO:1749 is the determined cDNA sequence of clone 61524913

[1790] SEQ ID NO:1750 is the determined cDNA sequence of clone 61524914

[1791] SEQ ID NO:1751 is the determined cDNA sequence of clone 61524915

[1792] SEQ ID NO:1752 is the determined cDNA sequence of clone 61524916

[1793] SEQ ID NO:1753 is the determined cDNA sequence of clone 61524918

[1794] SEQ ID NO:1754 is the determined cDNA sequence of clone 61524919

[1795] SEQ ID NO:1755 is the determined cDNA sequence of clone 61524920

[1796] SEQ ID NO:1756 is the determined cDNA sequence of clone 61524923

[1797] SEQ ID NO:1757 is the determined cDNA sequence of clone 61524924

[1798] SEQ ID NO:1758 is the determined cDNA sequence of clone 61524925

[1799] SEQ ID NO:1759 is the determined cDNA sequence of clone 61524926

[1800] SEQ ID NO:1760 is the determined cDNA sequence of clone 61524927

[1801] SEQ ID NO:1761 is the determined cDNA sequence of clone 61524933

[1802] SEQ ID NO:1762 is the determined cDNA sequence of clone 61524935

[1803] SEQ ID NO:1763 is the determined cDNA sequence of clone 61524937

[1804] SEQ ID NO: 1764 is the determined cDNA sequence of clone 61524939

[1805] SEQ ID NO:1765 is the determined cDNA sequence of clone 61524941

[1806] SEQ ID NO:1766 is the determined cDNA sequence of clone 61524942

[1807] SEQ ID NO:1767 is the determined cDNA sequence of clone 61524943

[1808] SEQ ID NO:1768 is the determined cDNA sequence of clone 61524944

[1809] SEQ ID NO:1769 is the determined cDNA sequence of clone 61524945

[1810] SEQ ID NO:1770 is the determined cDNA sequence of clone 61524946

[1811] SEQ ID NO:1771 is the determined cDNA sequence of clone 61524947

[1812] SEQ ID NO:1772 is the determined cDNA sequence of clone 61524948

[1813] SEQ ID NO:1773 is the determined cDNA sequence of clone 61524949

[1814] SEQ ID NO:1774 is the determined cDNA sequence of clone 61524950

[1815] SEQ ID NO:1775 is the determined cDNA sequence of clone 61524952

[1816] SEQ ID NO:1776 is the determined cDNA sequence of clone 61524953

[1817] SEQ ID NO:1777 is the determined cDNA sequence of clone 61524954

[1818] SEQ ID NO:1778 is the determined cDNA sequence of clone 61524956

[1819] SEQ ID NO:1779 is the determined cDNA sequence of clone 61524957

[1820] SEQ ID NO:1780 is the determined cDNA sequence of clone 61524958

[1821] SEQ ID NO:1781 is the determined cDNA sequence of clone 61524961

[1822] SEQ ID NO:1782 is the determined cDNA sequence of clone 61524962

[1823] SEQ ID NO:1783 is the determined cDNA sequence of clone 61524963

[1824] SEQ ID NO:1784 is the determined cDNA sequence of clone 61524964

[1825] SEQ ID NO:1785 is the determined cDNA sequence of clone 61547629

[1826] SEQ ID NO:1786 is the determined cDNA sequence of clone 61547630

[1827] SEQ ID NO:1787 is the determined cDNA sequence of clone 61547631

[1828] SEQ ID NO:1788 is the determined cDNA sequence of clone 61547632

[1829] SEQ ID NO:1789 is the determined cDNA sequence of clone 61547634

[1830] SEQ ID NO:1790 is the determined cDNA sequence of clone 61547635

[1831] SEQ ID NO:1791 is the determined cDNA sequence of clone 61547636

[1832] SEQ ID NO:1792 is the determined cDNA sequence of clone 61547637

[1833] SEQ ID NO:1793 is the determined cDNA sequence of clone 61547638

[1834] SEQ ID NO:1794 is the determined cDNA sequence of clone 61547639

[1835] SEQ ID NO:1795 is the determined cDNA sequence of clone 61547640

[1836] SEQ ID NO:1796 is the determined cDNA sequence of clone 61547644

[1837] SEQ ID NO:1797 is the determined cDNA sequence of clone 61547646

[1838] SEQ ID NO:1798 is the determined cDNA sequence of clone 61547647

[1839] SEQ ID NO:1799 is the determined cDNA sequence of clone 61547648

[1840] SEQ ID NO:1800 is the determined cDNA sequence of clone 61547652

[1841] SEQ ID NO:1801 is the determined cDNA sequence of clone 61547653

[1842] SEQ ID NO:1802 is the determined cDNA sequence of clone 61547654

[1843] SEQ ID NO:1803 is the determined cDNA sequence of clone 61547656

[1844] SEQ ID NO:1804 is the determined cDNA sequence of clone 61547657

[1845] SEQ ID NO:1805 is the determined cDNA sequence of clone 61547658

[1846] SEQ ID NO:1806 is the determined cDNA sequence of clone 61547659

[1847] SEQ ID NO:1807 is the determined cDNA sequence of clone 61547660

[1848] SEQ ID NO:1808 is the determined cDNA sequence of clone 61547661

[1849] SEQ ID NO:1809 is the determined cDNA sequence of clone 61547662

[1850] SEQ ID NO:1810 is the determined cDNA sequence of clone 61547664

[1851] SEQ ID NO:1811 is the determined cDNA sequence of clone 61547665

[1852] SEQ ID NO:1812 is the determined cDNA sequence of clone 61547666

[1853] SEQ ID NO:1813 is the determined cDNA sequence of clone 61547667

[1854] SEQ ID NO:1814 is the determined cDNA sequence of clone 61547669

[1855] SEQ ID NO:1815 is the determined cDNA sequence of clone 61547670

[1856] SEQ ID NO:1816 is the determined cDNA sequence of clone 61547671

[1857] SEQ ID NO:1817 is the determined cDNA sequence of clone 61547672

[1858] SEQ ID NO:1818 is the determined cDNA sequence of clone 61547673

[1859] SEQ ID NO:1819 is the determined cDNA sequence of clone 61547674

[1860] SEQ ID NO:1820 is the determined cDNA sequence of clone 61547675

[1861] SEQ ID NO:1821 is the determined cDNA sequence of clone 61547678

[1862] SEQ ID NO:1822 is the determined cDNA sequence of clone 61547679

[1863] SEQ ID NO:1823 is the determined cDNA sequence of clone 61547680

[1864] SEQ ID NO:1824 is the determined cDNA sequence of clone 61547681

[1865] SEQ ID NO:1825 is the determined cDNA sequence of clone 61547682

[1866] SEQ ID NO:1826 is the determined cDNA sequence of clone 61547683

[1867] SEQ ID NO:1827 is the determined cDNA sequence of clone 61547685

[1868] SEQ ID NO:1828 is the determined cDNA sequence of clone 61547686

[1869] SEQ ID NO:1829 is the determined cDNA sequence of clone 61547687

[1870] SEQ ID NO:1830 is the determined cDNA sequence of clone 61547689

[1871] SEQ ID NO:1831 is the determined cDNA sequence of clone 61547690

[1872] SEQ ID NO:1832 is the determined cDNA sequence of clone 61547691

[1873] SEQ ID NO:1833 is the determined cDNA sequence of clone 61547692

[1874] SEQ ID NO:1834 is the determined cDNA sequence of clone 61547695

[1875] SEQ ID NO:1835 is the determined cDNA sequence of clone 61547696

[1876] SEQ ID NO:1836 is the determined cDNA sequence of clone 61547697

[1877] SEQ ID NO:1837 is the determined cDNA sequence of clone 61547698

[1878] SEQ ID NO:1838 is the determined cDNA sequence of clone 61547699

[1879] SEQ ID NO:1839 is the determined cDNA sequence of clone 61547700

[1880] SEQ ID NO:1840 is the determined cDNA sequence of clone 61547701

[1881] SEQ ID NO:1841 is the determined cDNA sequence of clone 61547702

[1882] SEQ ID NO:1842 is the determined cDNA sequence of clone 61547703

[1883] SEQ ID NO:1843 is the determined cDNA sequence of clone 61547704

[1884] SEQ ID NO:1844 is the determined cDNA sequence of clone 61547705

[1885] SEQ ID NO:1845 is the determined cDNA sequence of clone 61547706

[1886] SEQ ID NO:1846 is the determined cDNA sequence of clone 61547707

[1887] SEQ ID NO:1847 is the determined cDNA sequence of clone 61547708

[1888] SEQ ID NO:1848 is the determined cDNA sequence of clone 61547710

[1889] SEQ ID NO:1849 is the determined cDNA sequence of clone 61547711

[1890] SEQ ID NO:1850 is the determined cDNA sequence of clone 61547712

[1891] SEQ ID NO:1851 is the determined cDNA sequence of clone 61547713

[1892] SEQ ID NO:1852 is the determined cDNA sequence of clone 61547714

[1893] SEQ ID NO:1853 is the determined cDNA sequence of clone 61547716

[1894] SEQ ID NO:1854 is the determined cDNA sequence of clone 61547718

[1895] SEQ ID NO:1855 is the determined cDNA sequence of clone 61547720

[1896] SEQ ID NO:1856 is the determined cDNA sequence of clone 61547722

[1897] SEQ ID NO:1857 is the determined cDNA sequence of clone 61547724

[1898] SEQ ID NO:1858 is the determined cDNA sequence of clone 61547725

[1899] SEQ ID NO:1859 is the determined cDNA sequence of clone 61547727

[1900] SEQ ID NO:1860 is the determined cDNA sequence of clone 61547728

[1901] SEQ ID NO:1861 is the determined cDNA sequence of clone 61547729

[1902] SEQ ID NO:1862 is the determined cDNA sequence of clone 61547730

[1903] SEQ ID NO:1863 is the determined cDNA sequence of clone 61547731

[1904] SEQ ID NO:1864 is the determined cDNA sequence of clone 61547733

[1905] SEQ ID NO:1865 is the determined cDNA sequence of clone 61547734

[1906] SEQ ID NO:1866 is the determined cDNA sequence of clone 61547735

[1907] SEQ ID NO:1867 is the determined cDNA sequence of clone 61547736

[1908] SEQ ID NO:1868 is the determined cDNA sequence of clone 61547737

[1909] SEQ ID NO:1869 is the determined cDNA sequence of clone 61547738

[1910] SEQ ID NO:1870 is the determined cDNA sequence of clone 61547739

[1911] SEQ ID NO:1871 is the determined cDNA sequence of clone 61547740

[1912] SEQ ID NO:1872 is the determined cDNA sequence of clone 61547741

[1913] SEQ ID NO:1873 is the determined cDNA sequence of clone 61547742

[1914] SEQ ID NO:1874 is the determined cDNA sequence of clone 61547743

[1915] SEQ ID NO:1875 is the determined cDNA sequence of clone 61547745

[1916] SEQ ID NO:1876 is the determined cDNA sequence of clone 61547746

[1917] SEQ ID NO:1877 is the determined cDNA sequence of clone 61547747

[1918] SEQ ID NO:1878 is the determined cDNA sequence of clone 61547748

[1919] SEQ ID NO:1879 is the determined cDNA sequence of clone 61547749

[1920] SEQ ID NO:1880 is the determined cDNA sequence of clone 61547750

[1921] SEQ ID NO:1881 is the determined cDNA sequence of clone 61547753

[1922] SEQ ID NO:1882 is the determined cDNA sequence of clone 61547754

[1923] SEQ ID NO:1883 is the determined cDNA sequence of clone 61547755

[1924] SEQ ID NO:1884 is the determined cDNA sequence of clone 61547756

[1925] SEQ ID NO:1885 is the determined cDNA sequence of clone 61547757

[1926] SEQ ID NO:1886 is the determined cDNA sequence of clone 61547759

[1927] SEQ ID NO:1887 is the determined cDNA sequence of clone 61547760

[1928] SEQ ID NO:1888 is the determined cDNA sequence of clone 61547761

[1929] SEQ ID NO:1889 is the determined cDNA sequence of clone 61547763

[1930] SEQ ID NO:1890 is the determined cDNA sequence of clone 61547764

[1931] SEQ ID NO:1891 is the determined cDNA sequence of clone 61547765

[1932] SEQ ID NO:1892 is the determined cDNA sequence of clone 61547766

[1933] SEQ ID NO:1893 is the determined cDNA sequence of clone 61547767

[1934] SEQ ID NO:1894 is the determined cDNA sequence of clone 61547769

[1935] SEQ ID NO:1895 is the determined cDNA sequence of clone 61547774

[1936] SEQ ID NO:1896 is the determined cDNA sequence of clone 61547775

[1937] SEQ ID NO:1897 is the determined cDNA sequence of clone 61547776

[1938] SEQ ID NO:1898 is the determined cDNA sequence of clone 61547777

[1939] SEQ ID NO:1899 is the determined cDNA sequence of clone 61547778

[1940] SEQ ID NO:1900 is the determined cDNA sequence of clone 61547779

[1941] SEQ ID NO:1901 is the determined cDNA sequence of clone 61547782

[1942] SEQ ID NO:1902 is the determined cDNA sequence of clone 61547783

[1943] SEQ ID NO:1903 is the determined cDNA sequence of clone 61547785

[1944] SEQ ID NO:1904 is the determined cDNA sequence of clone 61547786

[1945] SEQ ID NO:1905 is the determined cDNA sequence of clone 61547787

[1946] SEQ ID NO:1906 is the determined cDNA sequence of clone 61547788

[1947] SEQ ID NO:1907 is the determined cDNA sequence of clone 61547789

[1948] SEQ ID NO:1908 is the determined cDNA sequence of clone 61547790

[1949] SEQ ID NO:1909 is the determined cDNA sequence of clone 61547791

[1950] SEQ ID NO:1910 is the determined cDNA sequence of clone 61547792

[1951] SEQ ID NO:1911 is the determined cDNA sequence of clone 61547793

[1952] SEQ ID NO:1912 is the determined cDNA sequence of clone 61547795

[1953] SEQ ID NO:1913 is the determined cDNA sequence of clone 61547796

[1954] SEQ ID NO:1914 is the determined cDNA sequence of clone 61547797

[1955] SEQ ID NO:1915 is the determined cDNA sequence of clone 61547800

[1956] SEQ ID NO:1916 is the determined cDNA sequence of clone 61547801

[1957] SEQ ID NO:1917 is the determined cDNA sequence of clone 61547804

[1958] SEQ ID NO:1918 is the determined cDNA sequence of clone 61547805

[1959] SEQ ID NO:1919 is the determined cDNA sequence of clone 61547806

[1960] SEQ ID NO:1920 is the determined cDNA sequence of clone 61547808

[1961] SEQ ID NO:1921 is the determined cDNA sequence of clone 61547809

[1962] SEQ ID NO:1922 is the determined cDNA sequence of clone 61547810

[1963] SEQ ID NO:1923 is the determined cDNA sequence of clone 61547811

[1964] SEQ ID NO:1924 is the determined cDNA sequence of clone 61547812

[1965] SEQ ID NO:1925 is the determined cDNA sequence of clone 61547813

[1966] SEQ ID NO:1926 is the determined cDNA sequence of clone 61547814

[1967] SEQ ID NO:1927 is the determined cDNA sequence of clone 61496272

[1968] SEQ ID NO:1928 is the determined cDNA sequence of clone 61496273

[1969] SEQ ID NO:1929 is the determined cDNA sequence of clone 61496274

[1970] SEQ ID NO:1930 is the determined cDNA sequence of clone 61496275

[1971] SEQ ID NO:1931 is the determined cDNA sequence of clone 61496276

[1972] SEQ ID NO:1932 is the determined cDNA sequence of clone 61496277

[1973] SEQ ID NO:1933 is the determined cDNA sequence of clone 61496278

[1974] SEQ ID NO:1934 is the determined cDNA sequence of clone 61496279

[1975] SEQ ID NO:1935 is the determined cDNA sequence of clone 61496280

[1976] SEQ ID NO:1936 is the determined cDNA sequence of clone 61496281

[1977] SEQ ID NO:1937 is the determined cDNA sequence of clone 61496282

[1978] SEQ ID NO:1938 is the determined cDNA sequence of clone 61496283

[1979] SEQ ID NO:1939 is the determined cDNA sequence of clone 61496285

[1980] SEQ ID NO:1940 is the determined cDNA sequence of clone 61496286

[1981] SEQ ID NO:1941 is the determined cDNA sequence of clone 61496287

[1982] SEQ ID NO:1942 is the determined cDNA sequence of clone 61496288

[1983] SEQ ID NO:1943 is the determined cDNA sequence of clone 61496289

[1984] SEQ ID NO:1944 is the determined cDNA sequence of clone 61496290

[1985] SEQ ID NO:1945 is the determined cDNA sequence of clone 61496291

[1986] SEQ ID NO:1946 is the determined cDNA sequence of clone 61496292

[1987] SEQ ID NO:1947 is the determined cDNA sequence of clone 61496293

[1988] SEQ ID NO:1948 is the determined cDNA sequence of clone 61496294

[1989] SEQ ID NO:1949 is the determined cDNA sequence of clone 61496295

[1990] SEQ ID NO:1950 is the determined cDNA sequence of clone 61496298

[1991] SEQ ID NO:1951 is the determined cDNA sequence of clone 61496299

[1992] SEQ ID NO:1952 is the determined cDNA sequence of clone 61496300

[1993] SEQ ID NO:1953 is the determined cDNA sequence of clone 61496301

[1994] SEQ ID NO:1954 is the determined cDNA sequence of clone 61496302

[1995] SEQ ID NO:1955 is the determined cDNA sequence of clone 61496303

[1996] SEQ ID NO:1956 is the determined cDNA sequence of clone 61496304

[1997] SEQ ID NO:1957 is the determined cDNA sequence of clone 61496305

[1998] SEQ ID NO:1958 is the determined cDNA sequence of clone 61496308

[1999] SEQ ID NO:1959 is the determined cDNA sequence of clone 61496309

[2000] SEQ ID NO:1960 is the determined cDNA sequence of clone 61496310

[2001] SEQ ID NO:1961 is the determined cDNA sequence of clone 61496312

[2002] SEQ ID NO:1962 is the determined cDNA sequence of clone 61496313

[2003] SEQ ID NO:1963 is the determined cDNA sequence of clone 61496314

[2004] SEQ ID NO:1964 is the determined cDNA sequence of clone 61496315

[2005] SEQ ID NO:1965 is the determined cDNA sequence of clone 61496316

[2006] SEQ ID NO:1966 is the determined cDNA sequence of clone 61496317

[2007] SEQ ID NO:1967 is the determined cDNA sequence of clone 61496318

[2008] SEQ ID NO:1968 is the determined cDNA sequence of clone 61496319

[2009] SEQ ID NO:1969 is the determined cDNA sequence of clone 61496320

[2010] SEQ ID NO:1970 is the determined cDNA sequence of clone 61496322

[2011] SEQ ID NO:1971 is the determined cDNA sequence of clone 61496323

[2012] SEQ ID NO:1972 is the determined cDNA sequence of clone 61496324

[2013] SEQ ID NO:1973 is the determined cDNA sequence of clone 61496325

[2014] SEQ ID NO:1974 is the determined cDNA sequence of clone 61496326

[2015] SEQ ID NO:1975 is the determined cDNA sequence of clone 61496327

[2016] SEQ ID NO:1976 is the determined cDNA sequence of clone 61496328

[2017] SEQ ID NO:1977 is the determined cDNA sequence of clone 61496329

[2018] SEQ ID NO:1978 is the determined cDNA sequence of clone 61496330

[2019] SEQ ID NO:1979 is the determined cDNA sequence of clone 61496331

[2020] SEQ ID NO:1980 is the determined cDNA sequence of clone 61496332

[2021] SEQ ID NO:1981 is the determined cDNA sequence of clone 61496333

[2022] SEQ ID NO:1982 is the determined cDNA sequence of clone 61496334

[2023] SEQ ID NO:1983 is the determined cDNA sequence of clone 61496335

[2024] SEQ ID NO:1984 is the determined cDNA sequence of clone 61496336

[2025] SEQ ID NO:1985 is the determined cDNA sequence of clone 61496337

[2026] SEQ ID NO:1986 is the determined cDNA sequence of clone 61496338

[2027] SEQ ID NO:1987 is the determined cDNA sequence of clone 61496340

[2028] SEQ ID NO:1988 is the determined cDNA sequence of clone 61496341

[2029] SEQ ID NO:1989 is the determined cDNA sequence of clone 61496342

[2030] SEQ ID NO:1990 is the determined cDNA sequence of clone 61496343

[2031] SEQ ID NO:1991 is the determined cDNA sequence of clone 61496345

[2032] SEQ ID NO:1992 is the determined cDNA sequence of clone 61496346

[2033] SEQ ID NO:1993 is the determined cDNA sequence of clone 61496347

[2034] SEQ ID NO:1994 is the determined cDNA sequence of clone 61496348

[2035] SEQ ID NO:1995 is the determined cDNA sequence of clone 61496349

[2036] SEQ ID NO:1996 is the determined cDNA sequence of clone 61496351

[2037] SEQ ID NO:1997 is the determined cDNA sequence of clone 61496352

[2038] SEQ ID NO:1998 is the determined cDNA sequence of clone 61496353

[2039] SEQ ID NO:1999 is the determined cDNA sequence of clone 61496355

[2040] SEQ ID NO:2000 is the determined cDNA sequence of clone 61496356

[2041] SEQ ID NO:2001 is the determined cDNA sequence of clone 61496357

[2042] SEQ ID NO:2002 is the determined cDNA sequence of clone 61496358

[2043] SEQ ID NO:2003 is the determined cDNA sequence of clone 61496359

[2044] SEQ ID NO:2004 is the determined cDNA sequence of clone 61496360

[2045] SEQ ID NO:2005 is the determined cDNA sequence of clone 61496362

[2046] SEQ ID NO:2006 is the determined cDNA sequence of clone 61496363

[2047] SEQ ID NO:2007 is the determined cDNA sequence of clone 61496364

[2048] SEQ ID NO:2008 is the determined cDNA sequence of clone 61496373

[2049] SEQ ID NO:2009 is the determined cDNA sequence of clone 61496374

[2050] SEQ ID NO:2010 is the determined cDNA sequence of clone 61496375

[2051] SEQ ID NO:2011 is the determined cDNA sequence of clone 61496376

[2052] SEQ ID NO:2012 is the determined cDNA sequence of clone 61496378

[2053] SEQ ID NO:2013 is the determined cDNA sequence of clone 61496379

[2054] SEQ ID NO:2014 is the determined cDNA sequence of clone 61496380

[2055] SEQ ID NO:2015 is the determined cDNA sequence of clone 61496381

[2056] SEQ ID NO:2016 is the determined cDNA sequence of clone 61496383

[2057] SEQ ID NO:2017 is the determined cDNA sequence of clone 61496384

[2058] SEQ ID NO:2018 is the determined cDNA sequence of clone 61496386

[2059] SEQ ID NO:2019 is the determined cDNA sequence of clone 61496388

[2060] SEQ ID NO:2020 is the determined cDNA sequence of clone 61496390

[2061] SEQ ID NO:2021 is the determined cDNA sequence of clone 61496391

[2062] SEQ ID NO:2022 is the determined cDNA sequence of clone 61496394

[2063] SEQ ID NO:2023 is the determined cDNA sequence of clone 61496395

[2064] SEQ ID NO:2024 is the determined cDNA sequence of clone 61496398

[2065] SEQ ID NO:2025 is the determined cDNA sequence of clone 61496399

[2066] SEQ ID NO:2026 is the determined cDNA sequence of clone 61496400

[2067] SEQ ID NO:2027 is the determined cDNA sequence of clone 61496401

[2068] SEQ ID NO:2028 is the determined cDNA sequence of clone 61496402

[2069] SEQ ID NO:2029 is the determined cDNA sequence of clone 61496403

[2070] SEQ ID NO:2030 is the determined cDNA sequence of clone 61496404

[2071] SEQ ID NO:2031 is the determined cDNA sequence of clone 61496405

[2072] SEQ ID NO:2032 is the determined cDNA sequence of clone 61496406

[2073] SEQ ID NO:2033 is the determined cDNA sequence of clone 61496407

[2074] SEQ ID NO:2034 is the determined cDNA sequence of clone 61496408

[2075] SEQ ID NO:2035 is the determined cDNA sequence of clone 61496410

[2076] SEQ ID NO:2036 is the determined cDNA sequence of clone 61496411

[2077] SEQ ID NO:2037 is the determined cDNA sequence of clone 61496412

[2078] SEQ ID NO:2038 is the determined cDNA sequence of clone 61496413

[2079] SEQ ID NO:2039 is the determined cDNA sequence of clone 61496414

[2080] SEQ ID NO:2040 is the determined cDNA sequence of clone 61496416

[2081] SEQ ID NO:2041 is the determined cDNA sequence of clone 61496417

[2082] SEQ ID NO:2042 is the determined cDNA sequence of clone 61496418

[2083] SEQ ID NO:2043 is the determined cDNA sequence of clone 61496419

[2084] SEQ ID NO:2044 is the determined cDNA sequence of clone 61496420

[2085] SEQ ID NO:2045 is the determined cDNA sequence of clone 61496422

[2086] SEQ ID NO:2046 is the determined cDNA sequence of clone 61496423

[2087] SEQ ID NO:2047 is the determined cDNA sequence of clone 61496426

[2088] SEQ ID NO:2048 is the determined cDNA sequence of clone 61496427

[2089] SEQ ID NO:2049 is the determined cDNA sequence of clone 61496429

[2090] SEQ ID NO:2050 is the determined cDNA sequence of clone 61496430

[2091] SEQ ID NO:2051 is the determined cDNA sequence of clone 61496431

[2092] SEQ ID NO:2052 is the determined cDNA sequence of clone 61496432

[2093] SEQ ID NO:2053 is the determined cDNA sequence of clone 61496435

[2094] SEQ ID NO:2054 is the determined cDNA sequence of clone 61496436

[2095] SEQ ID NO:2055 is the determined cDNA sequence of clone 61496437

[2096] SEQ ID NO:2056 is the determined cDNA sequence of clone 61496438

[2097] SEQ ID NO:2057 is the determined cDNA sequence of clone 61496439

[2098] SEQ ID NO:2058 is the determined cDNA sequence of clone 61496440

[2099] SEQ ID NO:2059 is the determined cDNA sequence of clone 61496441

[2100] SEQ ID NO:2060 is the determined cDNA sequence of clone 61496442

[2101] SEQ ID NO:2061 is the determined cDNA sequence of clone 61496443

[2102] SEQ ID NO:2062 is the determined cDNA sequence of clone 61496444

[2103] SEQ ID NO:2063 is the determined cDNA sequence of clone 61496445

[2104] SEQ ID NO:2064 is the determined cDNA sequence of clone 61496446

[2105] SEQ ID NO:2065 is the determined cDNA sequence of clone 61496447

[2106] SEQ ID NO:2066 is the determined cDNA sequence of clone 61496449

[2107] SEQ ID NO:2067 is the determined cDNA sequence of clone 61496451

[2108] SEQ ID NO:2068 is the determined cDNA sequence of clone 61496452

[2109] SEQ ID NO:2069 is the determined cDNA sequence of clone 61496454

[2110] SEQ ID NO:2070 is the determined cDNA sequence of clone 61496455

[2111] SEQ ID NO:2071 is the determined cDNA sequence of clone 61496456

[2112] SEQ ID NO:2072 is the determined cDNA sequence of clone 61496458

[2113] SEQ ID NO:2073 is the determined cDNA sequence of clone 61496459

[2114] SEQ ID NO:2074 is the determined cDNA sequence of clone 61496461

[2115] SEQ ID NO:2075 is the determined cDNA sequence of clone 61496463

[2116] SEQ ID NO:2076 is the determined cDNA sequence of clone 61496464

[2117] SEQ ID NO:2077 is the determined cDNA sequence of clone 61496465

[2118] SEQ ID NO:2078 is the determined cDNA sequence of clone 61438480

[2119] SEQ ID NO:2079 is the determined cDNA sequence of clone 61438482

[2120] SEQ ID NO:2080 is the determined cDNA sequence of clone 61438484

[2121] SEQ ID NO:2081 is the determined cDNA sequence of clone 61438485

[2122] SEQ ID NO:2082 is the determined cDNA sequence of clone 61438486

[2123] SEQ ID NO:2083 is the determined cDNA sequence of clone 61438488

[2124] SEQ ID NO:2084 is the determined cDNA sequence of clone 61438489

[2125] SEQ ID NO:2085 is the determined cDNA sequence of clone 61438492

[2126] SEQ ID NO:2086 is the determined cDNA sequence of clone 61438493

[2127] SEQ ID NO:2087 is the determined cDNA sequence of clone 61438495

[2128] SEQ ID NO:2088 is the determined cDNA sequence of clone 61438496

[2129] SEQ ID NO:2089 is the determined cDNA sequence of clone 61438497

[2130] SEQ ID NO:2090 is the determined cDNA sequence of clone 61438500

[2131] SEQ ID NO:2091 is the determined cDNA sequence of clone 61438501

[2132] SEQ ID NO:2092 is the determined cDNA sequence of clone 61438503

[2133] SEQ ID NO:2093 is the determined cDNA sequence of clone 61438505

[2134] SEQ ID NO:2094 is the determined cDNA sequence of clone 61438506

[2135] SEQ ID NO:2095 is the determined cDNA sequence of clone 61438507

[2136] SEQ ID NO:2096 is the determined cDNA sequence of clone 61438508

[2137] SEQ ID NO:2097 is the determined cDNA sequence of clone 61438509

[2138] SEQ ID NO:2098 is the determined cDNA sequence of clone 61438510

[2139] SEQ ID NO:2099 is the determined cDNA sequence of clone 61438512

[2140] SEQ ID NO:2100 is the determined cDNA sequence of clone 61438513

[2141] SEQ ID NO:2101 is the determined cDNA sequence of clone 61438514

[2142] SEQ ID NO:2102 is the determined cDNA sequence of clone 61438516

[2143] SEQ ID NO:2103 is the determined cDNA sequence of clone 61438518

[2144] SEQ ID NO:2104 is the determined cDNA sequence of clone 61438519

[2145] SEQ ID NO:2105 is the determined cDNA sequence of clone 61438520

[2146] SEQ ID NO:2106 is the determined cDNA sequence of clone 61438521

[2147] SEQ ID NO:2107 is the determined cDNA sequence of clone 61438522

[2148] SEQ ID NO:2108 is the determined cDNA sequence of clone 61438523

[2149] SEQ ID NO:2109 is the determined cDNA sequence of clone 61438524

[2150] SEQ ID NO:2110 is the determined cDNA sequence of clone 61438525

[2151] SEQ ID NO:2111 is the determined cDNA sequence of clone 61438527

[2152] SEQ ID NO:2112 is the determined cDNA sequence of clone 61438528

[2153] SEQ ID NO:2113 is the determined cDNA sequence of clone 61438530

[2154] SEQ ID NO:2114 is the determined cDNA sequence of clone 61438531

[2155] SEQ ID NO:2115 is the determined cDNA sequence of clone 61438533

[2156] SEQ ID NO:2116 is the determined cDNA sequence of clone 61438535

[2157] SEQ ID NO:2117 is the determined cDNA sequence of clone 61438536

[2158] SEQ ID NO:2118 is the determined cDNA sequence of clone 61438537

[2159] SEQ ID NO:2119 is the determined cDNA sequence of clone 61438538

[2160] SEQ ID NO:2120 is the determined cDNA sequence of clone 61438539

[2161] SEQ ID NO:2121 is the determined cDNA sequence of clone 61438540

[2162] SEQ ID NO:2122 is the determined cDNA sequence of clone 61438543

[2163] SEQ ID NO:2123 is the determined cDNA sequence of clone 61438544

[2164] SEQ ID NO:2124 is the determined cDNA sequence of clone 61438545

[2165] SEQ ID NO:2125 is the determined cDNA sequence of clone 61438547

[2166] SEQ ID NO:2126 is the determined cDNA sequence of clone 61438550

[2167] SEQ ID NO:2127 is the determined cDNA sequence of clone 61438551

[2168] SEQ ID NO:2128 is the determined cDNA sequence of clone 61438552

[2169] SEQ ID NO:2129 is the determined cDNA sequence of clone 61438553

[2170] SEQ ID NO:2130 is the determined cDNA sequence of clone 61438554

[2171] SEQ ID NO:2131 is the determined cDNA sequence of clone 61438555

[2172] SEQ ID NO:2132 is the determined cDNA sequence of clone 61438557

[2173] SEQ ID NO:2133 is the determined cDNA sequence of clone 61438558

[2174] SEQ ID NO:2134 is the determined cDNA sequence of clone 61438559

[2175] SEQ ID NO:2135 is the determined cDNA sequence of clone 61438560

[2176] SEQ ID NO:2136 is the determined cDNA sequence of clone 61438562

[2177] SEQ ID NO:2137 is the determined cDNA sequence of clone 61438563

[2178] SEQ ID NO:2138 is the determined cDNA sequence of clone 61438564

[2179] SEQ ID NO:2139 is the determined cDNA sequence of clone 61438565

[2180] SEQ ID NO:2140 is the determined cDNA sequence of clone 61438566

[2181] SEQ ID NO:2141 is the determined cDNA sequence of clone 61438567

[2182] SEQ ID NO:2142 is the determined cDNA sequence of clone 61438568

[2183] SEQ ID NO:2143 is the determined cDNA sequence of clone 61438569

[2184] SEQ ID NO:2144 is the determined cDNA sequence of clone 61438570

[2185] SEQ ID NO:2145 is the determined cDNA sequence of clone 61438571

[2186] SEQ ID NO:2146 is the determined cDNA sequence of clone 61438572

[2187] SEQ ID NO:2147 is the determined cDNA sequence of clone 61496495

[2188] SEQ ID NO:2148 is the determined cDNA sequence of clone 61496496

[2189] SEQ ID NO:2149 is the determined cDNA sequence of clone 61496497

[2190] SEQ ID NO:2150 is the determined cDNA sequence of clone 61496498

[2191] SEQ ID NO:2151 is the determined cDNA sequence of clone 61496500

[2192] SEQ ID NO:2152 is the determined cDNA sequence of clone 61496501

[2193] SEQ ID NO:2153 is the determined cDNA sequence of clone 61496502

[2194] SEQ ID NO:2154 is the determined cDNA sequence of clone 61496505

[2195] SEQ ID NO:2155 is the determined cDNA sequence of clone 61496508

[2196] SEQ ID NO:2156 is the determined cDNA sequence of clone 61496510

[2197] SEQ ID NO:2157 is the determined cDNA sequence of clone 61496511

[2198] SEQ ID NO:2158 is the determined cDNA sequence of clone 61496512

[2199] SEQ ID NO:2159 is the determined cDNA sequence of clone 61496513

[2200] SEQ ID NO:2160 is the determined cDNA sequence of clone 61496515

[2201] SEQ ID NO:2161 is the determined cDNA sequence of clone 61496516

[2202] SEQ ID NO:2162 is the determined cDNA sequence of clone 61496517

[2203] SEQ ID NO:2163 is the determined cDNA sequence of clone 61496518

[2204] SEQ ID NO:2164 is the determined cDNA sequence of clone 61496519

[2205] SEQ ID NO:2165 is the determined cDNA sequence of clone 61496520

[2206] SEQ ID NO:2166 is the determined cDNA sequence of clone 61496521

[2207] SEQ ID NO:2167 is the determined cDNA sequence of clone 61496522

[2208] SEQ ID NO:2168 is the determined cDNA sequence of clone 61496523

[2209] SEQ ID NO:2169 is the determined cDNA sequence of clone 61496524

[2210] SEQ ID NO:2170 is the determined cDNA sequence of clone 61496526

[2211] SEQ ID NO:2171 is the determined cDNA sequence of clone 61496528

[2212] SEQ ID NO:2172 is the determined cDNA sequence of clone 61496529

[2213] SEQ ID NO:2173 is the determined cDNA sequence of clone 61496530

[2214] SEQ ID NO:2174 is the determined cDNA sequence of clone 61496532

[2215] SEQ ID NO:2175 is the determined cDNA sequence of clone 61496534

[2216] SEQ ID NO:2176 is the determined cDNA sequence of clone 61496536

[2217] SEQ ID NO:2177 is the determined cDNA sequence of clone 61496537

[2218] SEQ ID NO:2178 is the determined cDNA sequence of clone 61496539

[2219] SEQ ID NO:2179 is the determined cDNA sequence of clone 61496543

[2220] SEQ ID NO:2180 is the determined cDNA sequence of clone 61496544

[2221] SEQ ID NO:2181 is the determined cDNA sequence of clone 61496545

[2222] SEQ ID NO:2182 is the determined cDNA sequence of clone 61496546

[2223] SEQ ID NO:2183 is the determined cDNA sequence of clone 61496547

[2224] SEQ ID NO:2184 is the determined cDNA sequence of clone 61496549

[2225] SEQ ID NO:2185 is the determined cDNA sequence of clone 61496551

[2226] SEQ ID NO:2186 is the determined cDNA sequence of clone 61496552

[2227] SEQ ID NO:2187 is the determined cDNA sequence of clone 61496553

[2228] SEQ ID NO:2188 is the determined cDNA sequence of clone 61496554

[2229] SEQ ID NO:2189 is the determined cDNA sequence of clone 61496555

[2230] SEQ ID NO:2190 is the determined cDNA sequence of clone 61496556

[2231] SEQ ID NO:2191 is the determined cDNA sequence of clone 61496557

[2232] SEQ ID NO:2192 is the determined cDNA sequence of clone 61496558

[2233] SEQ ID NO:2193 is the determined cDNA sequence of clone 61496559

[2234] SEQ ID NO:2194 is the determined cDNA sequence of clone 61496560

[2235] SEQ ID NO:2195 is the determined cDNA sequence of clone 61496561

[2236] SEQ ID NO:2196 is the determined cDNA sequence of clone 61496562

[2237] SEQ ID NO:2197 is the determined cDNA sequence of clone 61496564

[2238] SEQ ID NO:2198 is the determined cDNA sequence of clone 61496565

[2239] SEQ ID NO:2199 is the determined cDNA sequence of clone 61496566

[2240] SEQ ID NO:2200 is the determined cDNA sequence of clone 61496567

[2241] SEQ ID NO:2201 is the determined cDNA sequence of clone 61496568

[2242] SEQ ID NO:2202 is the determined cDNA sequence of clone 61496569

[2243] SEQ ID NO:2203 is the determined cDNA sequence of clone 61496570

[2244] SEQ ID NO:2204 is the determined cDNA sequence of clone 61496571

[2245] SEQ ID NO:2205 is the determined cDNA sequence of clone 61496572

[2246] SEQ ID NO:2206 is the determined cDNA sequence of clone 61496573

[2247] SEQ ID NO:2207 is the determined cDNA sequence of clone 61496574

[2248] SEQ ID NO:2208 is the determined cDNA sequence of clone 61496575

[2249] SEQ ID NO:2209 is the determined cDNA sequence of clone 61496576

[2250] SEQ ID NO:2210 is the determined cDNA sequence of clone 61496577

[2251] SEQ ID NO:2211 is the determined cDNA sequence of clone 61496578

[2252] SEQ ID NO:2212 is the determined cDNA sequence of clone 61496581

[2253] SEQ ID NO:2213 is the determined cDNA sequence of clone 61496582

[2254] SEQ ID NO:2214 is the determined cDNA sequence of clone 61496583

[2255] SEQ ID NO:2215 is the determined cDNA sequence of clone 61496584

[2256] SEQ ID NO:2216 is the determined cDNA sequence of clone 61496585

[2257] SEQ ID NO:2217 is the determined cDNA sequence of clone 61496586

[2258] SEQ ID NO:2218 is the determined cDNA sequence of clone 61496587

[2259] SEQ ID NO:2219 is the determined cDNA sequence of clone 61496700

[2260] SEQ ID NO:2220 is the determined cDNA sequence of clone 61496701

[2261] SEQ ID NO:2221 is the determined cDNA sequence of clone 61496702

[2262] SEQ ID NO:2222 is the determined cDNA sequence of clone 61496704

[2263] SEQ ID NO:2223 is the determined cDNA sequence of clone 61496705

[2264] SEQ ID NO:2224 is the determined cDNA sequence of clone 61496709

[2265] SEQ ID NO:2225 is the determined cDNA sequence of clone 61496710

[2266] SEQ ID NO:2226 is the determined cDNA sequence of clone 61496713

[2267] SEQ ID NO:2227 is the determined cDNA sequence of clone 61496715

[2268] SEQ ID NO:2228 is the determined cDNA sequence of clone 61496716

[2269] SEQ ID NO:2229 is the determined cDNA sequence of clone 61496717

[2270] SEQ ID NO:2230 is the determined cDNA sequence of clone 61496718

[2271] SEQ ID NO:2231 is the determined cDNA sequence of clone 61496719

[2272] SEQ ID NO:2232 is the determined cDNA sequence of clone 61496720

[2273] SEQ ID NO:2233 is the determined cDNA sequence of clone 61496721

[2274] SEQ ID NO:2234 is the determined cDNA sequence of clone 61496722

[2275] SEQ ID NO:2235 is the determined cDNA sequence of clone 61496723

[2276] SEQ ID NO:2236 is the determined cDNA sequence of clone 61496725

[2277] SEQ ID NO:2237 is the determined cDNA sequence of clone 61496726

[2278] SEQ ID NO:2238 is the determined cDNA sequence of clone 61496727

[2279] SEQ ID NO:2239 is the determined cDNA sequence of clone 61496729

[2280] SEQ ID NO:2240 is the determined cDNA sequence of clone 61496731

[2281] SEQ ID NO:2241 is the determined cDNA sequence of clone 61496733

[2282] SEQ ID NO:2242 is the determined cDNA sequence of clone 61496735

[2283] SEQ ID NO:2243 is the determined cDNA sequence of clone 61496737

[2284] SEQ ID NO:2244 is the determined cDNA sequence of clone 61496738

[2285] SEQ ID NO:2245 is the determined cDNA sequence of clone 61496739

[2286] SEQ ID NO:2246 is the determined cDNA sequence of clone 61496740

[2287] SEQ ID NO:2247 is the determined cDNA sequence of clone 61496741

[2288] SEQ ID NO:2248 is the determined cDNA sequence of clone 61496743

[2289] SEQ ID NO:2249 is the determined cDNA sequence of clone 61496745

[2290] SEQ ID NO:2250 is the determined cDNA sequence of clone 61496746

[2291] SEQ ID NO:2251 is the determined cDNA sequence of clone 61496747

[2292] SEQ ID NO:2252 is the determined cDNA sequence of clone 61496748

[2293] SEQ ID NO:2253 is the determined cDNA sequence of clone 61496749

[2294] SEQ ID NO:2254 is the determined cDNA sequence of clone 61496750

[2295] SEQ ID NO:2255 is the determined cDNA sequence of clone 61496751

[2296] SEQ ID NO:2256 is the determined cDNA sequence of clone 61496753

[2297] SEQ ID NO:2257 is the determined cDNA sequence of clone 61496754

[2298] SEQ ID NO:2258 is the determined cDNA sequence of clone 61496756

[2299] SEQ ID NO:2259 is the determined cDNA sequence of clone 61496757

[2300] SEQ ID NO:2260 is the determined cDNA sequence of clone 61496758

[2301] SEQ ID NO:2261 is the determined cDNA sequence of clone 61496759

[2302] SEQ ID NO:2262 is the determined cDNA sequence of clone 61496761

[2303] SEQ ID NO:2263 is the determined cDNA sequence of clone 61496762

[2304] SEQ ID NO:2264 is the determined cDNA sequence of clone 61496763

[2305] SEQ ID NO:2265 is the determined cDNA sequence of clone 61496764

[2306] SEQ ID NO:2266 is the determined cDNA sequence of clone 61496765

[2307] SEQ ID NO:2267 is the determined cDNA sequence of clone 61496766

[2308] SEQ ID NO:2268 is the determined cDNA sequence of clone 61496768

[2309] SEQ ID NO:2269 is the determined cDNA sequence of clone 61496769

[2310] SEQ ID NO:2270 is the determined cDNA sequence of clone 61496770

[2311] SEQ ID NO:2271 is the determined cDNA sequence of clone 61496771

[2312] SEQ ID NO:2272 is the determined cDNA sequence of clone 61496772

[2313] SEQ ID NO:2273 is the determined cDNA sequence of clone 61496774

[2314] SEQ ID NO:2274 is the determined cDNA sequence of clone 61496776

[2315] SEQ ID NO:2275 is the determined cDNA sequence of clone 61496777

[2316] SEQ ID NO:2276 is the determined cDNA sequence of clone 61496778

[2317] SEQ ID NO:2277 is the determined cDNA sequence of clone 61496780

[2318] SEQ ID NO:2278 is the determined cDNA sequence of clone 61496781

[2319] SEQ ID NO:2279 is the determined cDNA sequence of clone 61496782

[2320] SEQ ID NO:2280 is the determined cDNA sequence of clone 61496783

[2321] SEQ ID NO:2281 is the determined cDNA sequence of clone 61496784

[2322] SEQ ID NO:2282 is the determined cDNA sequence of clone 61496785

[2323] SEQ ID NO:2283 is the determined cDNA sequence of clone 61496786

[2324] SEQ ID NO:2284 is the determined cDNA sequence of clone 61496787

[2325] SEQ ID NO:2285 is the determined cDNA sequence of clone 61496788

[2326] SEQ ID NO:2286 is the determined cDNA sequence of clone 61496789

[2327] SEQ ID NO:2287 is the determined cDNA sequence of clone 61496790

[2328] SEQ ID NO:2288 is the determined cDNA sequence of clone 61497422

[2329] SEQ ID NO:2289 is the determined cDNA sequence of clone 61497424

[2330] SEQ ID NO:2290 is the determined cDNA sequence of clone 61497425

[2331] SEQ ID NO:2291 is the determined cDNA sequence of clone 61497426

[2332] SEQ ID NO:2292 is the determined cDNA sequence of clone 61497429

[2333] SEQ ID NO:2293 is the determined cDNA sequence of clone 61497430

[2334] SEQ ID NO:2294 is the determined cDNA sequence of clone 61497432

[2335] SEQ ID NO:2295 is the determined cDNA sequence of clone 61497433

[2336] SEQ ID NO:2296 is the determined cDNA sequence of clone 61497435

[2337] SEQ ID NO:2297 is the determined cDNA sequence of clone 61497436

[2338] SEQ ID NO:2298 is the determined cDNA sequence of clone 61497437

[2339] SEQ ID NO:2299 is the determined cDNA sequence of clone 61497438

[2340] SEQ ID NO:2300 is the determined cDNA sequence of clone 61497439

[2341] SEQ ID NO:2301 is the determined cDNA sequence of clone 61497440

[2342] SEQ ID NO:2302 is the determined cDNA sequence of clone 61497441

[2343] SEQ ID NO:2303 is the determined cDNA sequence of clone 61497443

[2344] SEQ ID NO:2304 is the determined cDNA sequence of clone 61497444

[2345] SEQ ID NO:2305 is the determined cDNA sequence of clone 61497446

[2346] SEQ ID NO:2306 is the determined cDNA sequence of clone 61497447

[2347] SEQ ID NO:2307 is the determined cDNA sequence of clone 61497448

[2348] SEQ ID NO:2308 is the determined cDNA sequence of clone 61497450

[2349] SEQ ID NO:2309 is the determined cDNA sequence of clone 61497451

[2350] SEQ ID NO:2310 is the determined cDNA sequence of clone 61497452

[2351] SEQ ID NO:2311 is the determined cDNA sequence of clone 61497454

[2352] SEQ ID NO:2312 is the determined cDNA sequence of clone 61497455

[2353] SEQ ID NO:2313 is the determined cDNA sequence of clone 61497456

[2354] SEQ ID NO:2314 is the determined cDNA sequence of clone 61497457

[2355] SEQ ID NO:2315 is the determined cDNA sequence of clone 61497458

[2356] SEQ ID NO:2316 is the determined cDNA sequence of clone 61497459

[2357] SEQ ID NO:2317 is the determined cDNA sequence of clone 61497460

[2358] SEQ ID NO:2318 is the determined cDNA sequence of clone 61497462

[2359] SEQ ID NO:2319 is the determined cDNA sequence of clone 61497463

[2360] SEQ ID NO:2320 is the determined cDNA sequence of clone 61497464

[2361] SEQ ID NO:2321 is the determined cDNA sequence of clone 61497466

[2362] SEQ ID NO:2322 is the determined cDNA sequence of clone 61497468

[2363] SEQ ID NO:2323 is the determined cDNA sequence of clone 61497469

[2364] SEQ ID NO:2324 is the determined cDNA sequence of clone 61497470

[2365] SEQ ID NO:2325 is the determined cDNA sequence of clone 61497471

[2366] SEQ ID NO:2326 is the determined cDNA sequence of clone 61497473

[2367] SEQ ID NO:2327 is the determined cDNA sequence of clone 61497474

[2368] SEQ ID NO:2328 is the determined cDNA sequence of clone 61497477

[2369] SEQ ID NO:2329 is the determined cDNA sequence of clone 61497478

[2370] SEQ ID NO:2330 is the determined cDNA sequence of clone 61497479

[2371] SEQ ID NO:2331 is the determined cDNA sequence of clone 61497480

[2372] SEQ ID NO:2332 is the determined cDNA sequence of clone 61497481

[2373] SEQ ID NO:2333 is the determined cDNA sequence of clone 61497482

[2374] SEQ ID NO:2334 is the determined cDNA sequence of clone 61497483

[2375] SEQ ID NO:2335 is the determined cDNA sequence of clone 61497484

[2376] SEQ ID NO:2336 is the determined cDNA sequence of clone 61497486

[2377] SEQ ID NO:2337 is the determined cDNA sequence of clone 61497487

[2378] SEQ ID NO:2338 is the determined cDNA sequence of clone 61497488

[2379] SEQ ID NO:2339 is the determined cDNA sequence of clone 61497489

[2380] SEQ ID NO:2340 is the determined cDNA sequence of clone 61497490

[2381] SEQ ID NO:2341 is the determined cDNA sequence of clone 61497491

[2382] SEQ ID NO:2342 is the determined cDNA sequence of clone 61497493

[2383] SEQ ID NO:2343 is the determined cDNA sequence of clone 61497494

[2384] SEQ ID NO:2344 is the determined cDNA sequence of clone 61497495

[2385] SEQ ID NO:2345 is the determined cDNA sequence of clone 61497496

[2386] SEQ ID NO:2346 is the determined cDNA sequence of clone 61497497

[2387] SEQ ID NO:2347 is the determined cDNA sequence of clone 61497498

[2388] SEQ ID NO:2348 is the determined cDNA sequence of clone 61497499

[2389] SEQ ID NO:2349 is the determined cDNA sequence of clone 61497500

[2390] SEQ ID NO:2350 is the determined cDNA sequence of clone 61497501

[2391] SEQ ID NO:2351 is the determined cDNA sequence of clone 61497502

[2392] SEQ ID NO:2352 is the determined cDNA sequence of clone 61497503

[2393] SEQ ID NO:2353 is the determined cDNA sequence of clone 61497504

[2394] SEQ ID NO:2354 is the determined cDNA sequence of clone 61497505

[2395] SEQ ID NO:2355 is the determined cDNA sequence of clone 61497507

[2396] SEQ ID NO:2356 is the determined cDNA sequence of clone 61497509

[2397] SEQ ID NO:2357 is the determined cDNA sequence of clone 61497511

[2398] SEQ ID NO:2358 is the determined cDNA sequence of clone 61497512

[2399] SEQ ID NO:2359 is the determined cDNA sequence of clone 61497513

[2400] SEQ ID NO:2360 is the determined cDNA sequence of clone 61497514

[2401] SEQ ID NO:2361 is the determined cDNA sequence of clone 61497515

[2402] SEQ ID NO:2362 is the determined cDNA sequence of clone 61497516

[2403] SEQ ID NO:2363 is the determined cDNA sequence of clone 61497517

[2404] SEQ ID NO:2364 is the determined cDNA sequence of clone 61497518

[2405] SEQ ID NO:2365 is the determined cDNA sequence of clone 61497519

[2406] SEQ ID NO:2366 is the determined cDNA sequence of clone 61497520

[2407] SEQ ID NO:2367 is the determined cDNA sequence of clone 61497521

[2408] SEQ ID NO:2368 is the determined cDNA sequence of clone 61497522

[2409] SEQ ID NO:2369 is the determined cDNA sequence of clone 61497523

[2410] SEQ ID NO:2370 is the determined cDNA sequence of clone 61497524

[2411] SEQ ID NO:2371 is the determined cDNA sequence of clone 61497526

[2412] SEQ ID NO:2372 is the determined cDNA sequence of clone 61497527

[2413] SEQ ID NO:2373 is the determined cDNA sequence of clone 61497528

[2414] SEQ ID NO:2374 is the determined cDNA sequence of clone 61497529

[2415] SEQ ID NO:2375 is the determined cDNA sequence of clone 61497530

[2416] SEQ ID NO:2376 is the determined cDNA sequence of clone 61497531

[2417] SEQ ID NO:2377 is the determined cDNA sequence of clone 61497532

[2418] SEQ ID NO:2378 is the determined cDNA sequence of clone 61497533

[2419] SEQ ID NO:2379 is the determined cDNA sequence of clone 61497534

[2420] SEQ ID NO:2380 is the determined cDNA sequence of clone 61497535

[2421] SEQ ID NO:2381 is the determined cDNA sequence of clone 61497536

[2422] SEQ ID NO:2382 is the determined cDNA sequence of clone 61497537

[2423] SEQ ID NO:2383 is the determined cDNA sequence of clone 61497538

[2424] SEQ ID NO:2384 is the determined cDNA sequence of clone 61497539

[2425] SEQ ID NO:2385 is the determined cDNA sequence of clone 61497540

[2426] SEQ ID NO:2386 is the determined cDNA sequence of clone 61497541

[2427] SEQ ID NO:2387 is the determined cDNA sequence of clone 61497542

[2428] SEQ ID NO:2388 is the determined cDNA sequence of clone 61497543

[2429] SEQ ID NO:2389 is the determined cDNA sequence of clone 61497544

[2430] SEQ ID NO:2390 is the determined cDNA sequence of clone 61497545

[2431] SEQ ID NO:2391 is the determined cDNA sequence of clone 61497546

[2432] SEQ ID NO:2392 is the determined cDNA sequence of clone 61497547

[2433] SEQ ID NO:2393 is the determined cDNA sequence of clone 61497549

[2434] SEQ ID NO:2394 is the determined cDNA sequence of clone 61497551

[2435] SEQ ID NO:2395 is the determined cDNA sequence of clone 61497552

[2436] SEQ ID NO:2396 is the determined cDNA sequence of clone 61497553

[2437] SEQ ID NO:2397 is the determined cDNA sequence of clone 61497554

[2438] SEQ ID NO:2398 is the determined cDNA sequence of clone 61497556

[2439] SEQ ID NO:2399 is the determined cDNA sequence of clone 61497557

[2440] SEQ ID NO:2400 is the determined cDNA sequence of clone 61497560

[2441] SEQ ID NO:2401 is the determined cDNA sequence of clone 61497561

[2442] SEQ ID NO:2402 is the determined cDNA sequence of clone 61497562

[2443] SEQ ID NO:2403 is the determined cDNA sequence of clone 61497563

[2444] SEQ ID NO:2404 is the determined cDNA sequence of clone 61497564

[2445] SEQ ID NO:2405 is the determined cDNA sequence of clone 61497565

[2446] SEQ ID NO:2406 is the determined cDNA sequence of clone 61497566

[2447] SEQ ID NO:2407 is the determined cDNA sequence of clone 61497567

[2448] SEQ ID NO:2408 is the determined cDNA sequence of clone 61497568

[2449] SEQ ID NO:2409 is the determined cDNA sequence of clone 61497569

[2450] SEQ ID NO:2410 is the determined cDNA sequence of clone 61497570

[2451] SEQ ID NO:2411 is the determined cDNA sequence of clone 61497571

[2452] SEQ ID NO:2412 is the determined cDNA sequence of clone 61497572

[2453] SEQ ID NO:2413 is the determined cDNA sequence of clone 61497574

[2454] SEQ ID NO:2414 is the determined cDNA sequence of clone 61497575

[2455] SEQ ID NO:2415 is the determined cDNA sequence of clone 61497576

[2456] SEQ ID NO:2416 is the determined cDNA sequence of clone 61497577

[2457] SEQ ID NO:2417 is the determined cDNA sequence of clone 61497578

[2458] SEQ ID NO:2418 is the determined cDNA sequence of clone 61497579

[2459] SEQ ID NO:2419 is the determined cDNA sequence of clone 61497580

[2460] SEQ ID NO:2420 is the determined cDNA sequence of clone 61497581

[2461] SEQ ID NO:2421 is the determined cDNA sequence of clone 61497582

[2462] SEQ ID NO:2422 is the determined cDNA sequence of clone 61497583

[2463] SEQ ID NO:2423 is the determined cDNA sequence of clone 61497584

[2464] SEQ ID NO:2424 is the determined cDNA sequence of clone 61497585

[2465] SEQ ID NO:2425 is the determined cDNA sequence of clone 61497587

[2466] SEQ ID NO:2426 is the determined cDNA sequence of clone 61497588

[2467] SEQ ID NO:2427 is the determined cDNA sequence of clone 61497589

[2468] SEQ ID NO:2428 is the determined cDNA sequence of clone 61497590

[2469] SEQ ID NO:2429 is the determined cDNA sequence of clone 61497591

[2470] SEQ ID NO:2430 is the determined cDNA sequence of clone 61497592

[2471] SEQ ID NO:2431 is the determined cDNA sequence of clone 61497593

[2472] SEQ ID NO:2432 is the determined cDNA sequence of clone 61497594

[2473] SEQ ID NO:2433 is the determined cDNA sequence of clone 61497595

[2474] SEQ ID NO:2434 is the determined cDNA sequence of clone 61497596

[2475] SEQ ID NO:2435 is the determined cDNA sequence of clone 61497597

[2476] SEQ ID NO:2436 is the determined cDNA sequence of clone 61497598

[2477] SEQ ID NO:2437 is the determined cDNA sequence of clone 61497599

[2478] SEQ ID NO:2438 is the determined cDNA sequence of clone 61497600

[2479] SEQ ID NO:2439 is the determined cDNA sequence of clone 61497601

[2480] SEQ ID NO:2440 is the determined cDNA sequence of clone 61497602

[2481] SEQ ID NO:2441 is the determined cDNA sequence of clone 61497603

[2482] SEQ ID NO:2442 is the determined cDNA sequence of clone 61497604

[2483] SEQ ID NO:2443 is the determined cDNA sequence of clone 61497605

[2484] SEQ ID NO:2444 is the determined cDNA sequence of clone 61497606

[2485] SEQ ID NO:2445 is the determined cDNA sequence of clone 61497607

[2486] SEQ ID NO:2446 is the determined cDNA sequence of clone 61497608

[2487] SEQ ID NO:2447 is the determined cDNA sequence of clone 61497609

[2488] SEQ ID NO:2448 is the determined cDNA sequence of clone 61497610

[2489] SEQ ID NO:2449 is the determined cDNA sequence of clone 61497615

[2490] SEQ ID NO:2450 is the determined cDNA sequence of clone 61497616

[2491] SEQ ID NO:2451 is the determined cDNA sequence of clone 61497618

[2492] SEQ ID NO:2452 is the determined cDNA sequence of clone 61497619

[2493] SEQ ID NO:2453 is the determined cDNA sequence of clone 61497623

[2494] SEQ ID NO:2454 is the determined cDNA sequence of clone 61497624

[2495] SEQ ID NO:2455 is the determined cDNA sequence of clone 61497625

[2496] SEQ ID NO:2456 is the determined cDNA sequence of clone 61497626

[2497] SEQ ID NO:2457 is the determined cDNA sequence of clone 61497627

[2498] SEQ ID NO:2458 is the determined cDNA sequence of clone 61497628

[2499] SEQ ID NO:2459 is the determined cDNA sequence of clone 61497630

[2500] SEQ ID NO:2460 is the determined cDNA sequence of clone 61497631

[2501] SEQ ID NO:2461 is the determined cDNA sequence of clone 61497632

[2502] SEQ ID NO:2462 is the determined cDNA sequence of clone 61497633

[2503] SEQ ID NO:2463 is the determined cDNA sequence of clone 61497635

[2504] SEQ ID NO:2464 is the determined cDNA sequence of clone 61497636

[2505] SEQ ID NO:2465 is the determined cDNA sequence of clone 61497637

[2506] SEQ ID NO:2466 is the determined cDNA sequence of clone 61497638

[2507] SEQ ID NO:2467 is the determined cDNA sequence of clone 61497639

[2508] SEQ ID NO:2468 is the determined cDNA sequence of clone 61497640

[2509] SEQ ID NO:2469 is the determined cDNA sequence of clone 61497641

[2510] SEQ ID NO:2470 is the determined cDNA sequence of clone 61497643

[2511] SEQ ID NO:2471 is the determined cDNA sequence of clone 61497645

[2512] SEQ ID NO:2472 is the determined cDNA sequence of clone 61497646

[2513] SEQ ID NO:2473 is the determined cDNA sequence of clone 61497648

[2514] SEQ ID NO:2474 is the determined cDNA sequence of clone 61497649

[2515] SEQ ID NO:2475 is the determined cDNA sequence of clone 61497650

[2516] SEQ ID NO:2476 is the determined cDNA sequence of clone 61497652

[2517] SEQ ID NO:2477 is the determined cDNA sequence of clone 61497653

[2518] SEQ ID NO:2478 is the determined cDNA sequence of clone 61497655

[2519] SEQ ID NO:2479 is the determined cDNA sequence of clone 61497656

[2520] SEQ ID NO:2480 is the determined cDNA sequence of clone 61497657

[2521] SEQ ID NO:2481 is the determined cDNA sequence of clone 61497659

[2522] SEQ ID NO:2482 is the determined cDNA sequence of clone 61497660

[2523] SEQ ID NO:2483 is the determined cDNA sequence of clone 61497661

[2524] SEQ ID NO:2484 is the determined cDNA sequence of clone 61497662

[2525] SEQ ID NO:2485 is the determined cDNA sequence of clone 61497663

[2526] SEQ ID NO:2486 is the determined cDNA sequence of clone 61497664

[2527] SEQ ID NO:2487 is the determined cDNA sequence of clone 61497665

[2528] SEQ ID NO:2488 is the determined cDNA sequence of clone 61497666

[2529] SEQ ID NO:2489 is the determined cDNA sequence of clone 61497669

[2530] SEQ ID NO:2490 is the determined cDNA sequence of clone 61497670

[2531] SEQ ID NO:2491 is the determined cDNA sequence of clone 61497671

[2532] SEQ ID NO:2492 is the determined cDNA sequence of clone 61497673

[2533] SEQ ID NO:2493 is the determined cDNA sequence of clone 61497675

[2534] SEQ ID NO:2494 is the determined cDNA sequence of clone 61497676

[2535] SEQ ID NO:2495 is the determined cDNA sequence of clone 61497677

[2536] SEQ ID NO:2496 is the determined cDNA sequence of clone 61497678

[2537] SEQ ID NO:2497 is the determined cDNA sequence of clone 61497681

[2538] SEQ ID NO:2498 is the determined cDNA sequence of clone 61497682

[2539] SEQ ID NO:2499 is the determined cDNA sequence of clone 61497683

[2540] SEQ ID NO:2500 is the determined cDNA sequence of clone 61497684

[2541] SEQ ID NO:2501 is the determined cDNA sequence of clone 61497686

[2542] SEQ ID NO:2502 is the determined cDNA sequence of clone 61497687

[2543] SEQ ID NO:2503 is the determined cDNA sequence of clone 61497688

[2544] SEQ ID NO:2504 is the determined cDNA sequence of clone 61497691

[2545] SEQ ID NO:2505 is the determined cDNA sequence of clone 61497694

[2546] SEQ ID NO:2506 is the determined cDNA sequence of clone 61497695

[2547] SEQ ID NO:2507 is the determined cDNA sequence of clone 61524967

[2548] SEQ ID NO:2508 is the determined cDNA sequence of clone 61524969

[2549] SEQ ID NO:2509 is the determined cDNA sequence of clone 61524970

[2550] SEQ ID NO:2510 is the determined cDNA sequence of clone 61524971

[2551] SEQ ID NO:2511 is the determined cDNA sequence of clone 61524975

[2552] SEQ ID NO:2512 is the determined cDNA sequence of clone 61524976

[2553] SEQ ID NO:2513 is the determined cDNA sequence of clone 61524977

[2554] SEQ ID NO:2514 is the determined cDNA sequence of clone 61524979

[2555] SEQ ID NO:2515 is the determined cDNA sequence of clone 61524982

[2556] SEQ ID NO:2516 is the determined cDNA sequence of clone 61524983

[2557] SEQ ID NO:2517 is the determined cDNA sequence of clone 61524985

[2558] SEQ ID NO:2518 is the determined cDNA sequence of clone 61524986

[2559] SEQ ID NO:2519 is the determined cDNA sequence of clone 61524987

[2560] SEQ ID NO:2520 is the determined cDNA sequence of clone 61524988

[2561] SEQ ID NO:2521 is the determined cDNA sequence of clone 61524989

[2562] SEQ ID NO:2522 is the determined cDNA sequence of clone 61524990

[2563] SEQ ID NO:2523 is the determined cDNA sequence of clone 61524991

[2564] SEQ ID NO:2524 is the determined cDNA sequence of clone 61524993

[2565] SEQ ID NO:2525 is the determined cDNA sequence of clone 61524994

[2566] SEQ ID NO:2526 is the determined cDNA sequence of clone 61524995

[2567] SEQ ID NO:2527 is the determined cDNA sequence of clone 61524996

[2568] SEQ ID NO:2528 is the determined cDNA sequence of clone 61524997

[2569] SEQ ID NO:2529 is the determined cDNA sequence of clone 61524999

[2570] SEQ ID NO:2530 is the determined cDNA sequence of clone 61525000

[2571] SEQ ID NO:2531 is the determined cDNA sequence of clone 61525001

[2572] SEQ ID NO:2532 is the determined cDNA sequence of clone 61525003

[2573] SEQ ID NO:2533 is the determined cDNA sequence of clone 61525004

[2574] SEQ ID NO:2534 is the determined cDNA sequence of clone 61525005

[2575] SEQ ID NO:2535 is the determined cDNA sequence of clone 61525006

[2576] SEQ ID NO:2536 is the determined cDNA sequence of clone 61525007

[2577] SEQ ID NO:2537 is the determined cDNA sequence of clone 61525008

[2578] SEQ ID NO:2538 is the determined cDNA sequence of clone 61525009

[2579] SEQ ID NO:2539 is the determined cDNA sequence of clone 61525011

[2580] SEQ ID NO:2540 is the determined cDNA sequence of clone 61525013

[2581] SEQ ID NO:2541 is the determined cDNA sequence of clone 61525014

[2582] SEQ ID NO:2542 is the determined cDNA sequence of clone 61525015

[2583] SEQ ID NO:2543 is the determined cDNA sequence of clone 61525017

[2584] SEQ ID NO:2544 is the determined cDNA sequence of clone 61525020

[2585] SEQ ID NO:2545 is the determined cDNA sequence of clone 61525021

[2586] SEQ ID NO:2546 is the determined cDNA sequence of clone 61525022

[2587] SEQ ID NO:2547 is the determined cDNA sequence of clone 61525023

[2588] SEQ ID NO:2548 is the determined cDNA sequence of clone 61525026

[2589] SEQ ID NO:2549 is the determined cDNA sequence of clone 61525027

[2590] SEQ ID NO:2550 is the determined cDNA sequence of clone 61525029

[2591] SEQ ID NO:2551 is the determined cDNA sequence of clone 61525031

[2592] SEQ ID NO:2552 is the determined cDNA sequence of clone 61525034

[2593] SEQ ID NO:2553 is the determined cDNA sequence of clone 61525035

[2594] SEQ ID NO:2554 is the determined cDNA sequence of clone 61525038

[2595] SEQ ID NO:2555 is the determined cDNA sequence of clone 61525039

[2596] SEQ ID NO:2556 is the determined cDNA sequence of clone 61525040

[2597] SEQ ID NO:2557 is the determined cDNA sequence of clone 61525041

[2598] SEQ ID NO:2558 is the determined cDNA sequence of clone 61525042

[2599] SEQ ID NO:2559 is the determined cDNA sequence of clone 61525043

[2600] SEQ ID NO:2560 is the determined cDNA sequence of clone 61525044

[2601] SEQ ID NO:2561 is the determined cDNA sequence of clone 61525045

[2602] SEQ ID NO:2562 is the determined cDNA sequence of clone 61525047

[2603] SEQ ID NO:2563 is the determined cDNA sequence of clone 61525048

[2604] SEQ ID NO:2564 is the determined cDNA sequence of clone 61525049

[2605] SEQ ID NO:2565 is the determined cDNA sequence of clone 61525050

[2606] SEQ ID NO:2566 is the determined cDNA sequence of clone 61525052

[2607] SEQ ID NO:2567 is the determined cDNA sequence of clone 61525054

[2608] SEQ ID NO:2568 is the determined cDNA sequence of clone 61525055

[2609] SEQ ID NO:2569 is the determined cDNA sequence of clone 61525057

[2610] SEQ ID NO:2570 is the determined cDNA sequence of clone 61546433

[2611] SEQ ID NO:2571 is the determined cDNA sequence of clone 61546435

[2612] SEQ ID NO:2572 is the determined cDNA sequence of clone 61546436

[2613] SEQ ID NO:2573 is the determined cDNA sequence of clone 61546437

[2614] SEQ ID NO:2574 is the determined cDNA sequence of clone 61546439

[2615] SEQ ID NO:2575 is the determined cDNA sequence of clone 61546440

[2616] SEQ ID NO:2576 is the determined cDNA sequence of clone 61546442

[2617] SEQ ID NO:2577 is the determined cDNA sequence of clone 61546443

[2618] SEQ ID NO:2578 is the determined cDNA sequence of clone 61546444

[2619] SEQ ID NO:2579 is the determined cDNA sequence of clone 61546446

[2620] SEQ ID NO:2580 is the determined cDNA sequence of clone 61546447

[2621] SEQ ID NO:2581 is the determined cDNA sequence of clone 61546450

[2622] SEQ ID NO:2582 is the determined cDNA sequence of clone 61546451

[2623] SEQ ID NO:2583 is the determined cDNA sequence of clone 61546454

[2624] SEQ ID NO:2584 is the determined cDNA sequence of clone 61546455

[2625] SEQ ID NO:2585 is the determined cDNA sequence of clone 61546457

[2626] SEQ ID NO:2586 is the determined cDNA sequence of clone 61546458

[2627] SEQ ID NO:2587 is the determined cDNA sequence of clone 61546460

[2628] SEQ ID NO:2588 is the determined cDNA sequence of clone 61546461

[2629] SEQ ID NO:2589 is the determined cDNA sequence of clone 61546462

[2630] SEQ ID NO:2590 is the determined cDNA sequence of clone 61546463

[2631] SEQ ID NO:2591 is the determined cDNA sequence of clone 61546465

[2632] SEQ ID NO:2592 is the determined cDNA sequence of clone 61546466

[2633] SEQ ID NO:2593 is the determined cDNA sequence of clone 61546469

[2634] SEQ ID NO:2594 is the determined cDNA sequence of clone 61546471

[2635] SEQ ID NO:2595 is the determined cDNA sequence of clone 61546472

[2636] SEQ ID NO:2596 is the determined cDNA sequence of clone 61546473

[2637] SEQ ID NO:2597 is the determined cDNA sequence of clone 61546474

[2638] SEQ ID NO:2598 is the determined cDNA sequence of clone 61546475

[2639] SEQ ID NO:2599 is the determined cDNA sequence of clone 61546476

[2640] SEQ ID NO:2600 is the determined cDNA sequence of clone 61546477

[2641] SEQ ID NO:2601 is the determined cDNA sequence of clone 61546478

[2642] SEQ ID NO:2602 is the determined cDNA sequence of clone 61546480

[2643] SEQ ID NO:2603 is the determined cDNA sequence of clone 61546481

[2644] SEQ ID NO:2604 is the determined cDNA sequence of clone 61546482

[2645] SEQ ID NO:2605 is the determined cDNA sequence of clone 61546484

[2646] SEQ ID NO:2606 is the determined cDNA sequence of clone 61546487

[2647] SEQ ID NO:2607 is the determined cDNA sequence of clone 61546488

[2648] SEQ ID NO:2608 is the determined cDNA sequence of clone 61546490

[2649] SEQ ID NO:2609 is the determined cDNA sequence of clone 61546491

[2650] SEQ ID NO:2610 is the determined cDNA sequence of clone 61546492

[2651] SEQ ID NO:2611 is the determined cDNA sequence of clone 61546493

[2652] SEQ ID NO:2612 is the determined cDNA sequence of clone 61546496

[2653] SEQ ID NO:2613 is the determined cDNA sequence of clone 61546497

[2654] SEQ ID NO:2614 is the determined cDNA sequence of clone 61546498

[2655] SEQ ID NO:2615 is the determined cDNA sequence of clone 61546499

[2656] SEQ ID NO:2616 is the determined cDNA sequence of clone 61546500

[2657] SEQ ID NO:2617 is the determined cDNA sequence of clone 61546502

[2658] SEQ ID NO:2618 is the determined cDNA sequence of clone 61546503

[2659] SEQ ID NO:2619 is the determined cDNA sequence of clone 61546505

[2660] SEQ ID NO:2620 is the determined cDNA sequence of clone 61546507

[2661] SEQ ID NO:2621 is the determined cDNA sequence of clone 61546508

[2662] SEQ ID NO:2622 is the determined cDNA sequence of clone 61546509

[2663] SEQ ID NO:2623 is the determined cDNA sequence of clone 61546510

[2664] SEQ ID NO:2624 is the determined cDNA sequence of clone 61546512

[2665] SEQ ID NO:2625 is the determined cDNA sequence of clone 61546513

[2666] SEQ ID NO:2626 is the determined cDNA sequence of clone 61546516

[2667] SEQ ID NO:2627 is the determined cDNA sequence of clone 61546517

[2668] SEQ ID NO:2628 is the determined cDNA sequence of clone 61546518

[2669] SEQ ID NO:2629 is the determined cDNA sequence of clone 61546519

[2670] SEQ ID NO:2630 is the determined cDNA sequence of clone 61546520

[2671] SEQ ID NO:2631 is the determined cDNA sequence of clone 61546521

[2672] SEQ ID NO:2632 is the determined cDNA sequence of clone 61546522

[2673] SEQ ID NO:2633 is the determined cDNA sequence of clone 61546523

[2674] SEQ ID NO:2634 is the determined cDNA sequence of clone 61546524

[2675] SEQ ID NO:2635 is the determined cDNA sequence of clone 61814355

[2676] SEQ ID NO:2636 is the determined cDNA sequence of clone 61814356

[2677] SEQ ID NO:2637 is the determined cDNA sequence of clone 61814357

[2678] SEQ ID NO:2638 is the determined cDNA sequence of clone 61814360

[2679] SEQ ID NO:2639 is the determined cDNA sequence of clone 61814361

[2680] SEQ ID NO:2640 is the determined cDNA sequence of clone 61814362

[2681] SEQ ID NO:2641 is the determined cDNA sequence of clone 61814363

[2682] SEQ ID NO:2642 is the determined cDNA sequence of clone 61814364

[2683] SEQ ID NO:2643 is the determined cDNA sequence of clone 61814365

[2684] SEQ ID NO:2644 is the determined cDNA sequence of clone 61814366

[2685] SEQ ID NO:2645 is the determined cDNA sequence of clone 61814368

[2686] SEQ ID NO:2646 is the determined cDNA sequence of clone 61814369

[2687] SEQ ID NO:2647 is the determined cDNA sequence of clone 61814370

[2688] SEQ ID NO:2648 is the determined cDNA sequence of clone 61814371

[2689] SEQ ID NO:2649 is the determined cDNA sequence of clone 61814372

[2690] SEQ ID NO:2650 is the determined cDNA sequence of clone 61814373

[2691] SEQ ID NO:2651 is the determined cDNA sequence of clone 61814374

[2692] SEQ ID NO:2652 is the determined cDNA sequence of clone 61814376

[2693] SEQ ID NO:2653 is the determined cDNA sequence of clone 61814377

[2694] SEQ ID NO:2654 is the determined cDNA sequence of clone 61814378

[2695] SEQ ID NO:2655 is the determined cDNA sequence of clone 61814379

[2696] SEQ ID NO:2656 is the determined cDNA sequence of clone 61814381

[2697] SEQ ID NO:2657 is the determined cDNA sequence of clone 61814382

[2698] SEQ ID NO:2658 is the determined cDNA sequence of clone 61814383

[2699] SEQ ID NO:2659 is the determined cDNA sequence of clone 61814384

[2700] SEQ ID NO:2660 is the determined cDNA sequence of clone 61814385

[2701] SEQ ID NO:2661 is the determined cDNA sequence of clone 61814386

[2702] SEQ ID NO:2662 is the determined cDNA sequence of clone 61814387

[2703] SEQ ID NO:2663 is the determined cDNA sequence of clone 61814388

[2704] SEQ ID NO:2664 is the determined cDNA sequence of clone 61814389

[2705] SEQ ID NO:2665 is the determined cDNA sequence of clone 61814390

[2706] SEQ ID NO:2666 is the determined cDNA sequence of clone 61814391

[2707] SEQ ID NO:2667 is the determined cDNA sequence of clone 61814393

[2708] SEQ ID NO:2668 is the determined cDNA sequence of clone 61814394

[2709] SEQ ID NO:2669 is the determined cDNA sequence of clone 61814395

[2710] SEQ ID NO:2670 is the determined cDNA sequence of clone 61814396

[2711] SEQ ID NO:2671 is the determined cDNA sequence of clone 61814397

[2712] SEQ ID NO:2672 is the determined cDNA sequence of clone 61814398

[2713] SEQ ID NO:2673 is the determined cDNA sequence of clone 61814399

[2714] SEQ ID NO:2674 is the determined cDNA sequence of clone 61814400

[2715] SEQ ID NO:2675 is the determined cDNA sequence of clone 61814401

[2716] SEQ ID NO:2676 is the determined cDNA sequence of clone 61814402

[2717] SEQ ID NO:2677 is the determined cDNA sequence of clone 61814403

[2718] SEQ ID NO:2678 is the determined cDNA sequence of clone 61814405

[2719] SEQ ID NO:2679 is the determined cDNA sequence of clone 61814406

[2720] SEQ ID NO:2680 is the determined cDNA sequence of clone 61814407

[2721] SEQ ID NO:2681 is the determined cDNA sequence of clone 61814408

[2722] SEQ ID NO:2682 is the determined cDNA sequence of clone 61814409

[2723] SEQ ID NO:2683 is the determined cDNA sequence of clone 61814410

[2724] SEQ ID NO:2684 is the determined cDNA sequence of clone 61814411

[2725] SEQ ID NO:2685 is the determined cDNA sequence of clone 61814413

[2726] SEQ ID NO:2686 is the determined cDNA sequence of clone 61814414

[2727] SEQ ID NO:2687 is the determined cDNA sequence of clone 61814415

[2728] SEQ ID NO:2688 is the determined cDNA sequence of clone 61814416

[2729] SEQ ID NO:2689 is the determined cDNA sequence of clone 61814418

[2730] SEQ ID NO:2690 is the determined cDNA sequence of clone 61814419

[2731] SEQ ID NO:2691 is the determined cDNA sequence of clone 61814420

[2732] SEQ ID NO:2692 is the determined cDNA sequence of clone 61814421

[2733] SEQ ID NO:2693 is the determined cDNA sequence of clone 61814422

[2734] SEQ ID NO:2694 is the determined cDNA sequence of clone 61814423

[2735] SEQ ID NO:2695 is the determined cDNA sequence of clone 61814424

[2736] SEQ ID NO:2696 is the determined cDNA sequence of clone 61814426

[2737] SEQ ID NO:2697 is the determined cDNA sequence of clone 61814427

[2738] SEQ ID NO:2698 is the determined cDNA sequence of clone 61814428

[2739] SEQ ID NO:2699 is the determined cDNA sequence of clone 61814429

[2740] SEQ ID NO:2700 is the determined cDNA sequence of clone 61814431

[2741] SEQ ID NO:2701 is the determined cDNA sequence of clone 61814433

[2742] SEQ ID NO:2702 is the determined cDNA sequence of clone 61814434

[2743] SEQ ID NO:2703 is the determined cDNA sequence of clone 61814435

[2744] SEQ ID NO:2704 is the determined cDNA sequence of clone 61814436

[2745] SEQ ID NO:2705 is the determined cDNA sequence of clone 61814437

[2746] SEQ ID NO:2706 is the determined cDNA sequence of clone 61814438

[2747] SEQ ID NO:2707 is the determined cDNA sequence of clone 61814439

[2748] SEQ ID NO:2708 is the determined cDNA sequence of clone 61814440

[2749] SEQ ID NO:2709 is the determined cDNA sequence of clone 61814441

[2750] SEQ ID NO:2710 is the determined cDNA sequence of clone 61814442

[2751] SEQ ID NO:2711 is the determined cDNA sequence of clone 61814443

[2752] SEQ ID NO:2712 is the determined cDNA sequence of clone 61814444

[2753] SEQ ID NO:2713 is the determined cDNA sequence of clone 61814445

[2754] SEQ ID NO:2714 is the determined cDNA sequence of clone 61814446

[2755] SEQ ID NO:2715 is the determined cDNA sequence of clone 61814447

[2756] SEQ ID NO:2716 is the determined cDNA sequence of clone 61823768

[2757] SEQ ID NO:2717 is the determined cDNA sequence of clone 61823769

[2758] SEQ ID NO:2718 is the determined cDNA sequence of clone 61823770

[2759] SEQ ID NO:2719 is the determined cDNA sequence of clone 61823772

[2760] SEQ ID NO:2720 is the determined cDNA sequence of clone 61823773

[2761] SEQ ID NO:2721 is the determined cDNA sequence of clone 61823774

[2762] SEQ ID NO:2722 is the determined cDNA sequence of clone 61823775

[2763] SEQ ID NO:2723 is the determined cDNA sequence of clone 61823777

[2764] SEQ ID NO:2724 is the determined cDNA sequence of clone 61823778

[2765] SEQ ID NO:2725 is the determined cDNA sequence of clone 61823779

[2766] SEQ ID NO:2726 is the determined cDNA sequence of clone 61823780

[2767] SEQ ID NO:2727 is the determined cDNA sequence of clone 61823781

[2768] SEQ ID NO:2728 is the determined cDNA sequence of clone 61823782

[2769] SEQ ID NO:2729 is the determined cDNA sequence of clone 61823784

[2770] SEQ ID NO:2730 is the determined cDNA sequence of clone 61823785

[2771] SEQ ID NO:2731 is the determined cDNA sequence of clone 61823786

[2772] SEQ ID NO:2732 is the determined cDNA sequence of clone 61823787

[2773] SEQ ID NO:2733 is the determined cDNA sequence of clone 61823788

[2774] SEQ ID NO:2734 is the determined cDNA sequence of clone 61823789

[2775] SEQ ID NO:2735 is the determined cDNA sequence of clone 61823790

[2776] SEQ ID NO:2736 is the determined cDNA sequence of clone 61823791

[2777] SEQ ID NO:2737 is the determined cDNA sequence of clone 61823792

[2778] SEQ ID NO:2738 is the determined cDNA sequence of clone 61823793

[2779] SEQ ID NO:2739 is the determined cDNA sequence of clone 61823794

[2780] SEQ ID NO:2740 is the determined cDNA sequence of clone 61823797

[2781] SEQ ID NO:2741 is the determined cDNA sequence of clone 61823798

[2782] SEQ ID NO:2742 is the determined cDNA sequence of clone 61823799

[2783] SEQ ID NO:2743 is the determined cDNA sequence of clone 61823800

[2784] SEQ ID NO:2744 is the determined cDNA sequence of clone 61823801

[2785] SEQ ID NO:2745 is the determined cDNA sequence of clone 61823802

[2786] SEQ ID NO:2746 is the determined cDNA sequence of clone 61823803

[2787] SEQ ID NO:2747 is the determined cDNA sequence of clone 61823804

[2788] SEQ ID NO:2748 is the determined cDNA sequence of clone 61823805

[2789] SEQ ID NO:2749 is the determined cDNA sequence of clone 61823807

[2790] SEQ ID NO:2750 is the determined cDNA sequence of clone 61823808

[2791] SEQ ID NO:2751 is the determined cDNA sequence of clone 61823809

[2792] SEQ ID NO:2752 is the determined cDNA sequence of clone 61823810

[2793] SEQ ID NO:2753 is the determined cDNA sequence of clone 61823811

[2794] SEQ ID NO:2754 is the determined cDNA sequence of clone 61823812

[2795] SEQ ID NO:2755 is the determined cDNA sequence of clone 61823813

[2796] SEQ ID NO:2756 is the determined cDNA sequence of clone 61823814

[2797] SEQ ID NO:2757 is the determined cDNA sequence of clone 61823815

[2798] SEQ ID NO:2758 is the determined cDNA sequence of clone 61823816

[2799] SEQ ID NO:2759 is the determined cDNA sequence of clone 61823817

[2800] SEQ ID NO:2760 is the determined cDNA sequence of clone 61823818

[2801] SEQ ID NO:2761 is the determined cDNA sequence of clone 61823820

[2802] SEQ ID NO:2762 is the determined cDNA sequence of clone 61823821

[2803] SEQ ID NO:2763 is the determined cDNA sequence of clone 61823822

[2804] SEQ ID NO:2764 is the determined cDNA sequence of clone 61823823

[2805] SEQ ID NO:2765 is the determined cDNA sequence of clone 61823824

[2806] SEQ ID NO:2766 is the determined cDNA sequence of clone 61823825

[2807] SEQ ID NO:2767 is the determined cDNA sequence of clone 61823826

[2808] SEQ ID NO:2768 is the determined cDNA sequence of clone 61823827

[2809] SEQ ID NO:2769 is the determined cDNA sequence of clone 61823829

[2810] SEQ ID NO:2770 is the determined cDNA sequence of clone 61823830

[2811] SEQ ID NO:2771 is the determined cDNA sequence of clone 61823831

[2812] SEQ ID NO:2772 is the determined cDNA sequence of clone 61823833

[2813] SEQ ID NO:2773 is the determined cDNA sequence of clone 61823835

[2814] SEQ ID NO:2774 is the determined cDNA sequence of clone 61823837

[2815] SEQ ID NO:2775 is the determined cDNA sequence of clone 61823839

[2816] SEQ ID NO:2776 is the determined cDNA sequence of clone 61823840

[2817] SEQ ID NO:2777 is the determined cDNA sequence of clone 61823841

[2818] SEQ ID NO:2778 is the determined cDNA sequence of clone 61823843

[2819] SEQ ID NO:2779 is the determined cDNA sequence of clone 61823844

[2820] SEQ ID NO:2780 is the determined cDNA sequence of clone 61823845

[2821] SEQ ID NO:2781 is the determined cDNA sequence of clone 61823847

[2822] SEQ ID NO:2782 is the determined cDNA sequence of clone 61823849

[2823] SEQ ID NO:2783 is the determined cDNA sequence of clone 61823850

[2824] SEQ ID NO:2784 is the determined cDNA sequence of clone 61823851

[2825] SEQ ID NO:2785 is the determined cDNA sequence of clone 61823852

[2826] SEQ ID NO:2786 is the determined cDNA sequence of clone 61823854

[2827] SEQ ID NO:2787 is the determined cDNA sequence of clone 61823855

[2828] SEQ ID NO:2788 is the determined cDNA sequence of clone 61823856

[2829] SEQ ID NO:2789 is the determined cDNA sequence of clone 61823858

[2830] SEQ ID NO:2790 is the determined cDNA sequence of clone 61823859

[2831] SEQ ID NO:2791 is the determined cDNA sequence of clone 62342414

[2832] SEQ ID NO:2792 is the determined cDNA sequence of clone 62342416

[2833] SEQ ID NO:2793 is the determined cDNA sequence of clone 62342417

[2834] SEQ ID NO:2794 is the determined cDNA sequence of clone 62342422

[2835] SEQ ID NO:2795 is the determined cDNA sequence of clone 62342423

[2836] SEQ ID NO:2796 is the determined cDNA sequence of clone 62342425

[2837] SEQ ID NO:2797 is the determined cDNA sequence of clone 62342426

[2838] SEQ ID NO:2798 is the determined cDNA sequence of clone 62342428

[2839] SEQ ID NO:2799 is the determined cDNA sequence of clone 62342429

[2840] SEQ ID NO:2800 is the determined cDNA sequence of clone 62342430

[2841] SEQ ID NO:2801 is the determined cDNA sequence of clone 62342433

[2842] SEQ ID NO:2802 is the determined cDNA sequence of clone 62342434

[2843] SEQ ID NO:2803 is the determined cDNA sequence of clone 62342436

[2844] SEQ ID NO:2804 is the determined cDNA sequence of clone 62342437

[2845] SEQ ID NO:2805 is the determined cDNA sequence of clone 62342438

[2846] SEQ ID NO:2806 is the determined cDNA sequence of clone 62342439

[2847] SEQ ID NO:2807 is the determined cDNA sequence of clone 62342440

[2848] SEQ ID NO:2808 is the determined cDNA sequence of clone 62342442

[2849] SEQ ID NO:2809 is the determined cDNA sequence of clone 62342443

[2850] SEQ ID NO:2810 is the determined cDNA sequence of clone 62342447

[2851] SEQ ID NO:2811 is the determined cDNA sequence of clone 62342449

[2852] SEQ ID NO:2812 is the determined cDNA sequence of clone 62342452

[2853] SEQ ID NO:2813 is the determined cDNA sequence of clone 62342453

[2854] SEQ ID NO:2814 is the determined cDNA sequence of clone 62342454

[2855] SEQ ID NO:2815 is the determined cDNA sequence of clone 62342455

[2856] SEQ ID NO:2816 is the determined cDNA sequence of clone 62342456

[2857] SEQ ID NO:2817 is the determined cDNA sequence of clone 62342457

[2858] SEQ ID NO:2818 is the determined cDNA sequence of clone 62342458

[2859] SEQ ID NO:2819 is the determined cDNA sequence of clone 62342460

[2860] SEQ ID NO:2820 is the determined cDNA sequence of clone 62342462

[2861] SEQ ID NO:2821 is the determined cDNA sequence of clone 62342464

[2862] SEQ ID NO:2822 is the determined cDNA sequence of clone 62342467

[2863] SEQ ID NO:2823 is the determined cDNA sequence of clone 62342468

[2864] SEQ ID NO:2824 is the determined cDNA sequence of clone 62342469

[2865] SEQ ID NO:2825 is the determined cDNA sequence of clone 62342471

[2866] SEQ ID NO:2826 is the determined cDNA sequence of clone 62342476

[2867] SEQ ID NO:2827 is the determined cDNA sequence of clone 62342477

[2868] SEQ ID NO:2828 is the determined cDNA sequence of clone 62342480

[2869] SEQ ID NO:2829 is the determined cDNA sequence of clone 62342481

[2870] SEQ ID NO:2830 is the determined cDNA sequence of clone 62342484

[2871] SEQ ID NO:2831 is the determined cDNA sequence of clone 62342485

[2872] SEQ ID NO:2832 is the determined cDNA sequence of clone 62342488

[2873] SEQ ID NO:2833 is the determined cDNA sequence of clone 62342489

[2874] SEQ ID NO:2834 is the determined cDNA sequence of clone 62342490

[2875] SEQ ID NO:2835 is the determined cDNA sequence of clone 62342492

[2876] SEQ ID NO:2836 is the determined cDNA sequence of clone 62342493

[2877] SEQ ID NO:2837 is the determined cDNA sequence of clone 62342495

[2878] SEQ ID NO:2838 is the determined cDNA sequence of clone 62342497

[2879] SEQ ID NO:2839 is the determined cDNA sequence of clone 62342498

[2880] SEQ ID NO:2840 is the determined cDNA sequence of clone 62342504

[2881] SEQ ID NO:2841 is the determined cDNA sequence of clone 61814542

[2882] SEQ ID NO:2842 is the determined cDNA sequence of clone 61814543

[2883] SEQ ID NO:2843 is the determined cDNA sequence of clone 61814546

[2884] SEQ ID NO:2844 is the determined cDNA sequence of clone 61814548

[2885] SEQ ID NO:2845 is the determined cDNA sequence of clone 61814549

[2886] SEQ ID NO:2846 is the determined cDNA sequence of clone 61814550

[2887] SEQ ID NO:2847 is the determined cDNA sequence of clone 61814551

[2888] SEQ ID NO:2848 is the determined cDNA sequence of clone 61814552

[2889] SEQ ID NO:2849 is the determined cDNA sequence of clone 61814553

[2890] SEQ ID NO:2850 is the determined cDNA sequence of clone 61814554

[2891] SEQ ID NO:2851 is the determined cDNA sequence of clone 61814555

[2892] SEQ ID NO:2852 is the determined cDNA sequence of clone 61814556

[2893] SEQ ID NO:2853 is the determined cDNA sequence of clone 61814561

[2894] SEQ ID NO:2854 is the determined cDNA sequence of clone 61814562

[2895] SEQ ID NO:2855 is the determined cDNA sequence of clone 61814566

[2896] SEQ ID NO:2856 is the determined cDNA sequence of clone 61814568

[2897] SEQ ID NO:2857 is the determined cDNA sequence of clone 61814569

[2898] SEQ ID NO:2858 is the determined cDNA sequence of clone 61814570

[2899] SEQ ID NO:2859 is the determined cDNA sequence of clone 61814571

[2900] SEQ ID NO:2860 is the determined cDNA sequence of clone 61814572

[2901] SEQ ID NO:2861 is the determined cDNA sequence of clone 61814573

[2902] SEQ ID NO:2862 is the determined cDNA sequence of clone 61814575

[2903] SEQ ID NO:2863 is the determined cDNA sequence of clone 61814576

[2904] SEQ ID NO:2864 is the determined cDNA sequence of clone 61814577

[2905] SEQ ID NO:2865 is the determined cDNA sequence of clone 61814579

[2906] SEQ ID NO:2866 is the determined cDNA sequence of clone 61814580

[2907] SEQ ID NO:2867 is the determined cDNA sequence of clone 61814581

[2908] SEQ ID NO:2868 is the determined cDNA sequence of clone 61814583

[2909] SEQ ID NO:2869 is the determined cDNA sequence of clone 61814584

[2910] SEQ ID NO:2870 is the determined cDNA sequence of clone 61814585

[2911] SEQ ID NO:2871 is the determined cDNA sequence of clone 61814586

[2912] SEQ ID NO:2872 is the determined cDNA sequence of clone 61814587

[2913] SEQ ID NO:2873 is the determined cDNA sequence of clone 61814588

[2914] SEQ ID NO:2874 is the determined cDNA sequence of clone 61814589

[2915] SEQ ID NO:2875 is the determined cDNA sequence of clone 61814590

[2916] SEQ ID NO:2876 is the determined cDNA sequence of clone 61814591

[2917] SEQ ID NO:2877 is the determined cDNA sequence of clone 61814592

[2918] SEQ ID NO:2878 is the determined cDNA sequence of clone 61814595

[2919] SEQ ID NO:2879 is the determined cDNA sequence of clone 61814596

[2920] SEQ ID NO:2880 is the determined cDNA sequence of clone 61814598

[2921] SEQ ID NO:2881 is the determined cDNA sequence of clone 61814600

[2922] SEQ ID NO:2882 is the determined cDNA sequence of clone 61814601

[2923] SEQ ID NO:2883 is the determined cDNA sequence of clone 61814602

[2924] SEQ ID NO:2884 is the determined cDNA sequence of clone 61814604

[2925] SEQ ID NO:2885 is the determined cDNA sequence of clone 61814605

[2926] SEQ ID NO:2886 is the determined cDNA sequence of clone 61814606

[2927] SEQ ID NO:2887 is the determined cDNA sequence of clone 61814607

[2928] SEQ ID NO:2888 is the determined cDNA sequence of clone 61814608

[2929] SEQ ID NO:2889 is the determined cDNA sequence of clone 61814609

[2930] SEQ ID NO:2890 is the determined cDNA sequence of clone 61814610

[2931] SEQ ID NO:2891 is the determined cDNA sequence of clone 61814611

[2932] SEQ ID NO:2892 is the determined cDNA sequence of clone 61814612

[2933] SEQ ID NO:2893 is the determined cDNA sequence of clone 61814613

[2934] SEQ ID NO:2894 is the determined cDNA sequence of clone 61814614

[2935] SEQ ID NO:2895 is the determined cDNA sequence of clone 61814615

[2936] SEQ ID NO:2896 is the determined cDNA sequence of clone 61814616

[2937] SEQ ID NO:2897 is the determined cDNA sequence of clone 61814617

[2938] SEQ ID NO:2898 is the determined cDNA sequence of clone 61814618

[2939] SEQ ID NO:2899 is the determined cDNA sequence of clone 61814619

[2940] SEQ ID NO:2900 is the determined cDNA sequence of clone 61814620

[2941] SEQ ID NO:2901 is the determined cDNA sequence of clone 61814622

[2942] SEQ ID NO:2902 is the determined cDNA sequence of clone 61814623

[2943] SEQ ID NO:2903 is the determined cDNA sequence of clone 61814624

[2944] SEQ ID NO:2904 is the determined cDNA sequence of clone 61814625

[2945] SEQ ID NO:2905 is the determined cDNA sequence of clone 61814626

[2946] SEQ ID NO:2906 is the determined cDNA sequence of clone 61814627

[2947] SEQ ID NO:2907 is the determined cDNA sequence of clone 61814628

[2948] SEQ ID NO:2908 is the determined cDNA sequence of clone 61814629

[2949] SEQ ID NO:2909 is the determined cDNA sequence of clone 61814630

[2950] SEQ ID NO:2910 is the determined cDNA sequence of clone 61814631

[2951] SEQ ID NO:2911 is the determined cDNA sequence of clone 61814633

[2952] SEQ ID NO:2912 is the determined cDNA sequence of clone 61814449

[2953] SEQ ID NO:2913 is the determined cDNA sequence of clone 61814450

[2954] SEQ ID NO:2914 is the determined cDNA sequence of clone 61814452

[2955] SEQ ID NO:2915 is the determined cDNA sequence of clone 61814453

[2956] SEQ ID NO:2916 is the determined cDNA sequence of clone 61814454

[2957] SEQ ID NO:2917 is the determined cDNA sequence of clone 61814456

[2958] SEQ ID NO:2918 is the determined cDNA sequence of clone 61814457

[2959] SEQ ID NO:2919 is the determined cDNA sequence of clone 61814458

[2960] SEQ ID NO:2920 is the determined cDNA sequence of clone 61814459

[2961] SEQ ID NO:2921 is the determined cDNA sequence of clone 61814460

[2962] SEQ ID NO:2922 is the determined cDNA sequence of clone 61814461

[2963] SEQ ID NO:2923 is the determined cDNA sequence of clone 61814462

[2964] SEQ ID NO:2924 is the determined cDNA sequence of clone 61814466

[2965] SEQ ID NO:2925 is the determined cDNA sequence of clone 61814467

[2966] SEQ ID NO:2926 is the determined cDNA sequence of clone 61814468

[2967] SEQ ID NO:2927 is the determined cDNA sequence of clone 61814470

[2968] SEQ ID NO:2928 is the determined cDNA sequence of clone 61814471

[2969] SEQ ID NO:2929 is the determined cDNA sequence of clone 61814472

[2970] SEQ ID NO:2930 is the determined cDNA sequence of clone 61814473

[2971] SEQ ID NO:2931 is the determined cDNA sequence of clone 61814474

[2972] SEQ ID NO:2932 is the determined cDNA sequence of clone 61814476

[2973] SEQ ID NO:2933 is the determined cDNA sequence of clone 61814478

[2974] SEQ ID NO:2934 is the determined cDNA sequence of clone 61814483

[2975] SEQ ID NO:2935 is the determined cDNA sequence of clone 61814484

[2976] SEQ ID NO:2936 is the determined cDNA sequence of clone 61814485

[2977] SEQ ID NO:2937 is the determined cDNA sequence of clone 61814486

[2978] SEQ ID NO:2938 is the determined cDNA sequence of clone 61814487

[2979] SEQ ID NO:2939 is the determined cDNA sequence of clone 61814489

[2980] SEQ ID NO:2940 is the determined cDNA sequence of clone 61814490

[2981] SEQ ID NO:2941 is the determined cDNA sequence of clone 61814492

[2982] SEQ ID NO:2942 is the determined cDNA sequence of clone 61814494

[2983] SEQ ID NO:2943 is the determined cDNA sequence of clone 61814495

[2984] SEQ ID NO:2944 is the determined cDNA sequence of clone 61814496

[2985] SEQ ID NO:2945 is the determined cDNA sequence of clone 61814497

[2986] SEQ ID NO:2946 is the determined cDNA sequence of clone 61814498

[2987] SEQ ID NO:2947 is the determined cDNA sequence of clone 61814499

[2988] SEQ ID NO:2948 is the determined cDNA sequence of clone 61814500

[2989] SEQ ID NO:2949 is the determined cDNA sequence of clone 61814502

[2990] SEQ ID NO:2950 is the determined cDNA sequence of clone 61814503

[2991] SEQ ID NO:2951 is the determined cDNA sequence of clone 61814505

[2992] SEQ ID NO:2952 is the determined cDNA sequence of clone 61814506

[2993] SEQ ID NO:2953 is the determined cDNA sequence of clone 61814508

[2994] SEQ ID NO:2954 is the determined cDNA sequence of clone 61814509

[2995] SEQ ID NO:2955 is the determined cDNA sequence of clone 61814510

[2996] SEQ ID NO:2956 is the determined cDNA sequence of clone 61814512

[2997] SEQ ID NO:2957 is the determined cDNA sequence of clone 61814513

[2998] SEQ ID NO:2958 is the determined cDNA sequence of clone 61814514

[2999] SEQ ID NO:2959 is the determined cDNA sequence of clone 61814517

[3000] SEQ ID NO:2960 is the determined cDNA sequence of clone 61814518

[3001] SEQ ID NO:2961 is the determined cDNA sequence of clone 61814520

[3002] SEQ ID NO:2962 is the determined cDNA sequence of clone 61814521

[3003] SEQ ID NO:2963 is the determined cDNA sequence of clone 61814522

[3004] SEQ ID NO:2964 is the determined cDNA sequence of clone 61814523

[3005] SEQ ID NO:2965 is the determined cDNA sequence of clone 61814524

[3006] SEQ ID NO:2966 is the determined cDNA sequence of clone 61814525

[3007] SEQ ID NO:2967 is the determined cDNA sequence of clone 61814526

[3008] SEQ ID NO:2968 is the determined cDNA sequence of clone 61814528

[3009] SEQ ID NO:2969 is the determined cDNA sequence of clone 61814530

[3010] SEQ ID NO:2970 is the determined cDNA sequence of clone 61814531

[3011] SEQ ID NO:2971 is the determined cDNA sequence of clone 61814532

[3012] SEQ ID NO:2972 is the determined cDNA sequence of clone 61814534

[3013] SEQ ID NO:2973 is the determined cDNA sequence of clone 61814535

[3014] SEQ ID NO:2974 is the determined cDNA sequence of clone 61814536

[3015] SEQ ID NO:2975 is the determined cDNA sequence of clone 61814537

[3016] SEQ ID NO:2976 is the determined cDNA sequence of clone 61814538

[3017] SEQ ID NO:2977 is the determined cDNA sequence of clone 61814539

[3018] SEQ ID NO:2978 is the determined cDNA sequence of clone 61814540

[3019] SEQ ID NO:2979 is the determined cDNA sequence of clone 62210387

[3020] SEQ ID NO:2980 is the determined cDNA sequence of clone 62210388

[3021] SEQ ID NO:2981 is the determined cDNA sequence of clone 62210389

[3022] SEQ ID NO:2982 is the determined cDNA sequence of clone 62210390

[3023] SEQ ID NO:2983 is the determined cDNA sequence of clone 62210391

[3024] SEQ ID NO:2984 is the determined cDNA sequence of clone 62210394

[3025] SEQ ID NO:2985 is the determined cDNA sequence of clone 62210395

[3026] SEQ ID NO:2986 is the determined cDNA sequence of clone 62210397

[3027] SEQ ID NO:2987 is the determined cDNA sequence of clone 62210398

[3028] SEQ ID NO:2988 is the determined cDNA sequence of clone 62210399

[3029] SEQ ID NO:2989 is the determined cDNA sequence of clone 62210401

[3030] SEQ ID NO:2990 is the determined cDNA sequence of clone 62210403

[3031] SEQ ID NO:2991 is the determined cDNA sequence of clone 62210404

[3032] SEQ ID NO:2992 is the determined cDNA sequence of clone 63231658

[3033] SEQ ID NO:2993 is the determined cDNA sequence of clone 63231659

[3034] SEQ ID NO:2994 is the determined cDNA sequence of clone 63231660

[3035] SEQ ID NO:2995 is the determined cDNA sequence of clone 63231661

[3036] SEQ ID NO:2996 is the determined cDNA sequence of clone 63231662

[3037] SEQ ID NO:2997 is the determined cDNA sequence of clone 63231664

[3038] SEQ ID NO:2998 is the determined cDNA sequence of clone 63231665

[3039] SEQ ID NO:2999 is the determined cDNA sequence of clone 63231666

[3040] SEQ ID NO:3000 is the determined cDNA sequence of clone 63231667

[3041] SEQ ID NO:3001 is the determined cDNA sequence of clone 63231668

[3042] SEQ ID NO:3002 is the determined cDNA sequence of clone 63231669

[3043] SEQ ID NO:3003 is the determined cDNA sequence of clone 63231670

[3044] SEQ ID NO:3004 is the determined cDNA sequence of clone 63231671

[3045] SEQ ID NO:3005 is the determined cDNA sequence of clone 63231672

[3046] SEQ ID NO:3006 is the determined cDNA sequence of clone 63231673

[3047] SEQ ID NO:3007 is the determined cDNA sequence of clone 63231674

[3048] SEQ ID NO:3008 is the determined cDNA sequence of clone 63231675

[3049] SEQ ID NO:3009 is the determined cDNA sequence of clone 63231676

[3050] SEQ ID NO:3010 is the determined cDNA sequence of clone 63231677

[3051] SEQ ID NO:3011 is the determined cDNA sequence of clone 63231678

[3052] SEQ ID NO:3012 is the determined cDNA sequence of clone 63231679

[3053] SEQ ID NO:3013 is the determined cDNA sequence of clone 63231680

[3054] SEQ ID NO:3014 is the determined cDNA sequence of clone 63231681

[3055] SEQ ID NO:3015 is the determined cDNA sequence of clone 63231682

[3056] SEQ ID NO:3016 is the determined cDNA sequence of clone 63231683

[3057] SEQ ID NO:3017 is the determined cDNA sequence of clone 63231684

[3058] SEQ ID NO:3018 is the determined cDNA sequence of clone 63231685

[3059] SEQ ID NO:3019 is the determined cDNA sequence of clone 63231686

[3060] SEQ ID NO:3020 is the determined cDNA sequence of clone 63231687

[3061] SEQ ID NO:3021 is the determined cDNA sequence of clone 63231688

[3062] SEQ ID NO:3022 is the determined cDNA sequence of clone 63231689

[3063] SEQ ID NO:3023 is the determined cDNA sequence of clone 63231690

[3064] SEQ ID NO:3024 is the determined cDNA sequence of clone 63231691

[3065] SEQ ID NO:3025 is the determined cDNA sequence of clone 63231692

[3066] SEQ ID NO:3026 is the determined cDNA sequence of clone 63231693

[3067] SEQ ID NO:3027 is the determined cDNA sequence of clone 63231694

[3068] SEQ ID NO:3028 is the determined cDNA sequence of clone 63231695

[3069] SEQ ID NO:3029 is the determined cDNA sequence of clone 63231696

[3070] SEQ ID NO:3030 is the determined cDNA sequence of clone 63231697

[3071] SEQ ID NO:3031 is the determined cDNA sequence of clone 63231698

[3072] SEQ ID NO:3032 is the determined cDNA sequence of clone 63231699

[3073] SEQ ID NO:3033 is the determined cDNA sequence of clone 63231700

[3074] SEQ ID NO:3034 is the determined cDNA sequence of clone 63231701

[3075] SEQ ID NO:3035 is the determined cDNA sequence of clone 63231702

[3076] SEQ ID NO:3036 is the determined cDNA sequence of clone 63231703

[3077] SEQ ID NO:3037 is the determined cDNA sequence of clone 63231704

[3078] SEQ ID NO:3038 is the determined cDNA sequence of clone 63231705

[3079] SEQ ID NO:3039 is the determined cDNA sequence of clone 63231706

[3080] SEQ ID NO:3040 is the determined cDNA sequence of clone 63231707

[3081] SEQ ID NO:3041 is the determined cDNA sequence of clone 63231708

[3082] SEQ ID NO:3042 is the determined cDNA sequence of clone 63231709

[3083] SEQ ID NO:3043 is the determined cDNA sequence of clone 63231711

[3084] SEQ ID NO:3044 is the determined cDNA sequence of clone 63231713

[3085] SEQ ID NO:3045 is the determined cDNA sequence of clone 63231715

[3086] SEQ ID NO:3046 is the determined cDNA sequence of clone 63231716

[3087] SEQ ID NO:3047 is the determined cDNA sequence of clone 63231717

[3088] SEQ ID NO:3048 is the determined cDNA sequence of clone 63231718

[3089] SEQ ID NO:3049 is the determined cDNA sequence of clone 63231719

[3090] SEQ ID NO:3050 is the determined cDNA sequence of clone 63231720

[3091] SEQ ID NO:3051 is the determined cDNA sequence of clone 63231721

[3092] SEQ ID NO:3052 is the determined cDNA sequence of clone 63231723

[3093] SEQ ID NO:3053 is the determined cDNA sequence of clone 63231724

[3094] SEQ ID NO:3054 is the determined cDNA sequence of clone 63231725

[3095] SEQ ID NO:3055 is the determined cDNA sequence of clone 63231726

[3096] SEQ ID NO:3056 is the determined cDNA sequence of clone 63231727

[3097] SEQ ID NO:3057 is the determined cDNA sequence of clone 63231729

[3098] SEQ ID NO:3058 is the determined cDNA sequence of clone 63231730

[3099] SEQ ID NO:3059 is the determined cDNA sequence of clone 63231731

[3100] SEQ ID NO:3060 is the determined cDNA sequence of clone 63231732

[3101] SEQ ID NO:3061 is the determined cDNA sequence of clone 63138223

[3102] SEQ ID NO:3062 is the determined cDNA sequence of clone 63138224

[3103] SEQ ID NO:3063 is the determined cDNA sequence of clone 63138225

[3104] SEQ ID NO:3064 is the determined cDNA sequence of clone 63138226

[3105] SEQ ID NO:3065 is the determined cDNA sequence of clone 63138227

[3106] SEQ ID NO:3066 is the determined cDNA sequence of clone 63138228

[3107] SEQ ID NO:3067 is the determined cDNA sequence of clone 63138229

[3108] SEQ ID NO:3068 is the determined cDNA sequence of clone 63138230

[3109] SEQ ID NO:3069 is the determined cDNA sequence of clone 63138231

[3110] SEQ ID NO:3070 is the determined cDNA sequence of clone 63138232

[3111] SEQ ID NO:3071 is the determined cDNA sequence of clone 63138233

[3112] SEQ ID NO:3072 is the determined cDNA sequence of clone 63138234

[3113] SEQ ID NO:3073 is the determined cDNA sequence of clone 63138235

[3114] SEQ ID NO:3074 is the determined cDNA sequence of clone 63138237

[3115] SEQ ID NO:3075 is the determined cDNA sequence of clone 63138239

[3116] SEQ ID NO:3076 is the determined cDNA sequence of clone 63138240

[3117] SEQ ID NO:3077 is the determined cDNA sequence of clone 63138241

[3118] SEQ ID NO:3078 is the determined cDNA sequence of clone 63138242

[3119] SEQ ID NO:3079 is the determined cDNA sequence of clone 63138243

[3120] SEQ ID NO:3080 is the determined cDNA sequence of clone 63138244

[3121] SEQ ID NO:3081 is the determined cDNA sequence of clone 63138246

[3122] SEQ ID NO:3082 is the determined cDNA sequence of clone 63138249

[3123] SEQ ID NO:3083 is the determined cDNA sequence of clone 63138250

[3124] SEQ ID NO:3084 is the determined cDNA sequence of clone 63138251

[3125] SEQ ID NO:3085 is the determined cDNA sequence of clone 63138252

[3126] SEQ ID NO:3086 is the determined cDNA sequence of clone 63138253

[3127] SEQ ID NO:3087 is the determined cDNA sequence of clone 63138254

[3128] SEQ ID NO:3088 is the determined cDNA sequence of clone 63138255

[3129] SEQ ID NO:3089 is the determined cDNA sequence of clone 63138256

[3130] SEQ ID NO:3090 is the determined cDNA sequence of clone 63138257

[3131] SEQ ID NO:3091 is the determined cDNA sequence of clone 63138258

[3132] SEQ ID NO:3092 is the determined cDNA sequence of clone 63138259

[3133] SEQ ID NO:3093 is the determined cDNA sequence of clone 63138260

[3134] SEQ ID NO:3094 is the determined cDNA sequence of clone 63138262

[3135] SEQ ID NO:3095 is the determined cDNA sequence of clone 63138264

[3136] SEQ ID NO:3096 is the determined cDNA sequence of clone 63138265

[3137] SEQ ID NO:3097 is the determined cDNA sequence of clone 63138266

[3138] SEQ ID NO:3098 is the determined cDNA sequence of clone 63138267

[3139] SEQ ID NO:3099 is the determined cDNA sequence of clone 63138268

[3140] SEQ ID NO:3100 is the determined cDNA sequence of clone 63138269

[3141] SEQ ID NO:3101 is the determined cDNA sequence of clone 63138270

[3142] SEQ ID NO:3102 is the determined cDNA sequence of clone 63138271

[3143] SEQ ID NO:3103 is the determined cDNA sequence of clone 63138272

[3144] SEQ ID NO:3104 is the determined cDNA sequence of clone 63138273

[3145] SEQ ID NO:3105 is the determined cDNA sequence of clone 63138274

[3146] SEQ ID NO:3106 is the determined cDNA sequence of clone 63138275

[3147] SEQ ID NO:3107 is the determined cDNA sequence of clone 63138276

[3148] SEQ ID NO:3108 is the determined cDNA sequence of clone 63138277

[3149] SEQ ID NO:3109 is the determined cDNA sequence of clone 63138278

[3150] SEQ ID NO:3110 is the determined cDNA sequence of clone 63138279

[3151] SEQ ID NO:3111 is the determined cDNA sequence of clone 63138280

[3152] SEQ ID NO:3112 is the determined cDNA sequence of clone 63138281

[3153] SEQ ID NO:3113 is the determined cDNA sequence of clone 63138282

[3154] SEQ ID NO:3114 is the determined cDNA sequence of clone 63138283

[3155] SEQ ID NO:3115 is the determined cDNA sequence of clone 63138284

[3156] SEQ ID NO:3116 is the determined cDNA sequence of clone 63138285

[3157] SEQ ID NO:3117 is the determined cDNA sequence of clone 63138286

[3158] SEQ ID NO:3118 is the determined cDNA sequence of clone 63138287

[3159] SEQ ID NO:3119 is the determined cDNA sequence of clone 63138288

[3160] SEQ ID NO:3120 is the determined cDNA sequence of clone 63138289

[3161] SEQ ID NO:3121 is the determined cDNA sequence of clone 63138290

[3162] SEQ ID NO:3122 is the determined cDNA sequence of clone 63138291

[3163] SEQ ID NO:3123 is the determined cDNA sequence of clone 63138292

[3164] SEQ ID NO:3124 is the determined cDNA sequence of clone 63138294

[3165] SEQ ID NO:3125 is the determined cDNA sequence of clone 63138295

[3166] SEQ ID NO:3126 is the determined cDNA sequence of clone 63138296

[3167] SEQ ID NO:3127 is the determined cDNA sequence of clone 63138297

[3168] SEQ ID NO:3128 is the determined cDNA sequence of clone 63138298

[3169] SEQ ID NO:3129 is the determined cDNA sequence of clone 63138299

[3170] SEQ ID NO:3130 is the determined cDNA sequence of clone 63138300

[3171] SEQ ID NO:3131 is the determined cDNA sequence of clone 63138302

[3172] SEQ ID NO:3132 is the determined cDNA sequence of clone 63138303

[3173] SEQ ID NO:3133 is the determined cDNA sequence of clone 63138304

[3174] SEQ ID NO:3134 is the determined cDNA sequence of clone 63138305

[3175] SEQ ID NO:3135 is the determined cDNA sequence of clone 63138306

[3176] SEQ ID NO:3136 is the determined cDNA sequence of clone 63138308

[3177] SEQ ID NO:3137 is the determined cDNA sequence of clone 63138309

[3178] SEQ ID NO:3138 is the determined cDNA sequence of clone 63138311

[3179] SEQ ID NO:3139 is the determined cDNA sequence of clone 63138312

[3180] SEQ ID NO:3140 is the determined cDNA sequence of clone 63138313

[3181] SEQ ID NO:3141 is the determined cDNA sequence of clone 63138314

[3182] SEQ ID NO:3142 is the determined cDNA sequence of clone 63298516

[3183] SEQ ID NO:3143 is the determined cDNA sequence of clone 63298517

[3184] SEQ ID NO:3144 is the determined cDNA sequence of clone 63298518

[3185] SEQ ID NO:3145 is the determined cDNA sequence of clone 63298519

[3186] SEQ ID NO:3146 is the determined cDNA sequence of clone 63298520

[3187] SEQ ID NO:3147 is the determined cDNA sequence of clone 63298521

[3188] SEQ ID NO:3148 is the determined cDNA sequence of clone 63298522

[3189] SEQ ID NO:3149 is the determined cDNA sequence of clone 63298523

[3190] SEQ ID NO:3150 is the determined cDNA sequence of clone 63298524

[3191] SEQ ID NO:3151 is the determined cDNA sequence of clone 63298526

[3192] SEQ ID NO:3152 is the determined cDNA sequence of clone 63298527

[3193] SEQ ID NO:3153 is the determined cDNA sequence of clone 63298528

[3194] SEQ ID NO:3154 is the determined cDNA sequence of clone 63298529

[3195] SEQ ID NO:3155 is the determined cDNA sequence of clone 63298530

[3196] SEQ ID NO:3156 is the determined cDNA sequence of clone 63298531

[3197] SEQ ID NO:3157 is the determined cDNA sequence of clone 63298532

[3198] SEQ ID NO:3158 is the determined cDNA sequence of clone 63298533

[3199] SEQ ID NO:3159 is the determined cDNA sequence of clone 63298534

[3200] SEQ ID NO:3160 is the determined cDNA sequence of clone 63298535

[3201] SEQ ID NO:3161 is the determined cDNA sequence of clone 63298537

[3202] SEQ ID NO:3162 is the determined cDNA sequence of clone 63298538

[3203] SEQ ID NO:3163 is the determined cDNA sequence of clone 63298539

[3204] SEQ ID NO:3164 is the determined cDNA sequence of clone 63298540

[3205] SEQ ID NO:3165 is the determined cDNA sequence of clone 63298541

[3206] SEQ ID NO:3166 is the determined cDNA sequence of clone 63298542

[3207] SEQ ID NO:3167 is the determined cDNA sequence of clone 63298543

[3208] SEQ ID NO:3168 is the determined cDNA sequence of clone 63298544

[3209] SEQ ID NO:3169 is the determined cDNA sequence of clone 63298545

[3210] SEQ ID NO:3170 is the determined cDNA sequence of clone 63298546

[3211] SEQ ID NO:3171 is the determined cDNA sequence of clone 63298547

[3212] SEQ ID NO:3172 is the determined cDNA sequence of clone 63298548

[3213] SEQ ID NO:3173 is the determined cDNA sequence of clone 63298549

[3214] SEQ ID NO:3174 is the determined cDNA sequence of clone 63298550

[3215] SEQ ID NO:3175 is the determined cDNA sequence of clone 63298551

[3216] SEQ ID NO:3176 is the determined cDNA sequence of clone 63298552

[3217] SEQ ID NO:3177 is the determined cDNA sequence of clone 63298554

[3218] SEQ ID NO:3178 is the determined cDNA sequence of clone 63298555

[3219] SEQ ID NO:3179 is the determined cDNA sequence of clone 63298556

[3220] SEQ ID NO:3180 is the determined cDNA sequence of clone 63298557

[3221] SEQ ID NO:3181 is the determined cDNA sequence of clone 63298558

[3222] SEQ ID NO:3182 is the determined cDNA sequence of clone 63298559

[3223] SEQ ID NO:3183 is the determined cDNA sequence of clone 63298560

[3224] SEQ ID NO:3184 is the determined cDNA sequence of clone 63298561

[3225] SEQ ID NO:3185 is the determined cDNA sequence of clone 63298562

[3226] SEQ ID NO:3186 is the determined cDNA sequence of clone 63298563

[3227] SEQ ID NO:3187 is the determined cDNA sequence of clone 63298564

[3228] SEQ ID NO:3188 is the determined cDNA sequence of clone 63298565

[3229] SEQ ID NO:3189 is the determined cDNA sequence of clone 63298566

[3230] SEQ ID NO:3190 is the determined cDNA sequence of clone 63298567

[3231] SEQ ID NO:3191 is the determined cDNA sequence of clone 63298568

[3232] SEQ ID NO:3192 is the determined cDNA sequence of clone 63298569

[3233] SEQ ID NO:3193 is the determined cDNA sequence of clone 63298570

[3234] SEQ ID NO:3194 is the determined cDNA sequence of clone 63298571

[3235] SEQ ID NO:3195 is the determined cDNA sequence of clone 63298572

[3236] SEQ ID NO:3196 is the determined cDNA sequence of clone 63298573

[3237] SEQ ID NO:3197 is the determined cDNA sequence of clone 63298574

[3238] SEQ ID NO:3198 is the determined cDNA sequence of clone 63298575

[3239] SEQ ID NO:3199 is the determined cDNA sequence of clone 63298576

[3240] SEQ ID NO:3200 is the determined cDNA sequence of clone 63298577

[3241] SEQ ID NO:3201 is the determined cDNA sequence of clone 63298579

[3242] SEQ ID NO:3202 is the determined cDNA sequence of clone 63298580

[3243] SEQ ID NO:3203 is the determined cDNA sequence of clone 63298581

[3244] SEQ ID NO:3204 is the determined cDNA sequence of clone 63298582

[3245] SEQ ID NO:3205 is the determined cDNA sequence of clone 63298583

[3246] SEQ ID NO:3206 is the determined cDNA sequence of clone 63298584

[3247] SEQ ID NO:3207 is the determined cDNA sequence of clone 63298585

[3248] SEQ ID NO:3208 is the determined cDNA sequence of clone 63298586

[3249] SEQ ID NO:3209 is the determined cDNA sequence of clone 63298588

[3250] SEQ ID NO:3210 is the determined cDNA sequence of clone 63298589

[3251] SEQ ID NO:3211 is the determined cDNA sequence of clone 63298590

[3252] SEQ ID NO:3212 is the determined cDNA sequence of clone 63298591

[3253] SEQ ID NO:3213 is the determined cDNA sequence of clone 63298592

[3254] SEQ ID NO:3214 is the determined cDNA sequence of clone 63298593

[3255] SEQ ID NO:3215 is the determined cDNA sequence of clone 63298594

[3256] SEQ ID NO:3216 is the determined cDNA sequence of clone 63298595

[3257] SEQ ID NO:3217 is the determined cDNA sequence of clone 63298596

[3258] SEQ ID NO:3218 is the determined cDNA sequence of clone 63298597

[3259] SEQ ID NO:3219 is the determined cDNA sequence of clone 63298599

[3260] SEQ ID NO:3220 is the determined cDNA sequence of clone 63298600

[3261] SEQ ID NO:3221 is the determined cDNA sequence of clone 63298601

[3262] SEQ ID NO:3222 is the determined cDNA sequence of clone 63298602

[3263] SEQ ID NO:3223 is the determined cDNA sequence of clone 63298603

[3264] SEQ ID NO:3224 is the determined cDNA sequence of clone 63298604

[3265] SEQ ID NO:3225 is the determined cDNA sequence of clone 63298605

[3266] SEQ ID NO:3226 is the determined cDNA sequence of clone 63298606

[3267] SEQ ID NO:3227 is the determined cDNA sequence of clone 63298607

[3268] SEQ ID NO:3228 is the determined cDNA sequence of clone 63298608

[3269] SEQ ID NO:3229 is the determined cDNA sequence of clone 63231735

[3270] SEQ ID NO:3230 is the determined cDNA sequence of clone 63231736

[3271] SEQ ID NO:3231 is the determined cDNA sequence of clone 63231737

[3272] SEQ ID NO:3232 is the determined cDNA sequence of clone 63231738

[3273] SEQ ID NO:3233 is the determined cDNA sequence of clone 63231739

[3274] SEQ ID NO:3234 is the determined cDNA sequence of clone 63231740

[3275] SEQ ID NO:3235 is the determined cDNA sequence of clone 63231741

[3276] SEQ ID NO:3236 is the determined cDNA sequence of clone 63231742

[3277] SEQ ID NO:3237 is the determined cDNA sequence of clone 63231743

[3278] SEQ ID NO:3238 is the determined cDNA sequence of clone 63231746

[3279] SEQ ID NO:3239 is the determined cDNA sequence of clone 63231755

[3280] SEQ ID NO:3240 is the determined cDNA sequence of clone 63231756

[3281] SEQ ID NO:3241 is the determined cDNA sequence of clone 63231757

[3282] SEQ ID NO:3242 is the determined cDNA sequence of clone 63231758

[3283] SEQ ID NO:3243 is the determined cDNA sequence of clone 63231759

[3284] SEQ ID NO:3244 is the determined cDNA sequence of clone 63231760

[3285] SEQ ID NO:3245 is the determined cDNA sequence of clone 63231761

[3286] SEQ ID NO:3246 is the determined cDNA sequence of clone 63231762

[3287] SEQ ID NO:3247 is the determined cDNA sequence of clone 63231763

[3288] SEQ ID NO:3248 is the determined cDNA sequence of clone 63231764

[3289] SEQ ID NO:3249 is the determined cDNA sequence of clone 63231765

[3290] SEQ ID NO:3250 is the determined cDNA sequence of clone 63231766

[3291] SEQ ID NO:3251 is the determined cDNA sequence of clone 63231767

[3292] SEQ ID NO:3252 is the determined cDNA sequence of clone 63231768

[3293] SEQ ID NO:3253 is the determined cDNA sequence of clone 63231769

[3294] SEQ ID NO:3254 is the determined cDNA sequence of clone 63231770

[3295] SEQ ID NO:3255 is the determined cDNA sequence of clone 63231771

[3296] SEQ ID NO:3256 is the determined cDNA sequence of clone 63231772

[3297] SEQ ID NO:3257 is the determined cDNA sequence of clone 63231773

[3298] SEQ ID NO:3258 is the determined cDNA sequence of clone 63231774

[3299] SEQ ID NO:3259 is the determined cDNA sequence of clone 63231775

[3300] SEQ ID NO:3260 is the determined cDNA sequence of clone 63231776

[3301] SEQ ID NO:3261 is the determined cDNA sequence of clone 63231778

[3302] SEQ ID NO:3262 is the determined cDNA sequence of clone 63231779

[3303] SEQ ID NO:3263 is the determined cDNA sequence of clone 63231780

[3304] SEQ ID NO:3264 is the determined cDNA sequence of clone 63231781

[3305] SEQ ID NO:3265 is the determined cDNA sequence of clone 63231783

[3306] SEQ ID NO:3266 is the determined cDNA sequence of clone 63231784

[3307] SEQ ID NO:3267 is the determined cDNA sequence of clone 63231785

[3308] SEQ ID NO:3268 is the determined cDNA sequence of clone 63231786

[3309] SEQ ID NO:3269 is the determined cDNA sequence of clone 63231787

[3310] SEQ ID NO:3270 is the determined cDNA sequence of clone 63231788

[3311] SEQ ID NO:3271 is the determined cDNA sequence of clone 63231789

[3312] SEQ ID NO:3272 is the determined cDNA sequence of clone 63231790

[3313] SEQ ID NO:3273 is the determined cDNA sequence of clone 63231791

[3314] SEQ ID NO:3274 is the determined cDNA sequence of clone 63231792

[3315] SEQ ID NO:3275 is the determined cDNA sequence of clone 63231793

[3316] SEQ ID NO:3276 is the determined cDNA sequence of clone 63231794

[3317] SEQ ID NO:3277 is the determined cDNA sequence of clone 63231795

[3318] SEQ ID NO:3278 is the determined cDNA sequence of clone 63231796

[3319] SEQ ID NO:3279 is the determined cDNA sequence of clone 63231797

[3320] SEQ ID NO:3280 is the determined cDNA sequence of clone 63231798

[3321] SEQ ID NO:3281 is the determined cDNA sequence of clone 63231799

[3322] SEQ ID NO:3282 is the determined cDNA sequence of clone 63231800

[3323] SEQ ID NO:3283 is the determined cDNA sequence of clone 63231801

[3324] SEQ ID NO:3284 is the determined cDNA sequence of clone 63231802

[3325] SEQ ID NO:3285 is the determined cDNA sequence of clone 63231803

[3326] SEQ ID NO:3286 is the determined cDNA sequence of clone 63231804

[3327] SEQ ID NO:3287 is the determined cDNA sequence of clone 63231805

[3328] SEQ ID NO:3288 is the determined cDNA sequence of clone 63231806

[3329] SEQ ID NO:3289 is the determined cDNA sequence of clone 63231809

[3330] SEQ ID NO:3290 is the determined cDNA sequence of clone 63231810

[3331] SEQ ID NO:3291 is the determined cDNA sequence of clone 63231811

[3332] SEQ ID NO:3292 is the determined cDNA sequence of clone 63231812

[3333] SEQ ID NO:3293 is the determined cDNA sequence of clone 63231813

[3334] SEQ ID NO:3294 is the determined cDNA sequence of clone 63231814

[3335] SEQ ID NO:3295 is the determined cDNA sequence of clone 63231815

[3336] SEQ ID NO:3296 is the determined cDNA sequence of clone 63231816

[3337] SEQ ID NO:3297 is the determined cDNA sequence of clone 63231817

[3338] SEQ ID NO:3298 is the determined cDNA sequence of clone 63231818

[3339] SEQ ID NO:3299 is the determined cDNA sequence of clone 63231819

[3340] SEQ ID NO:3300 is the determined cDNA sequence of clone 63231821

[3341] SEQ ID NO:3301 is the determined cDNA sequence of clone 63231822

[3342] SEQ ID NO:3302 is the determined cDNA sequence of clone 63231823

[3343] SEQ ID NO:3303 is the determined cDNA sequence of clone 63231824

[3344] SEQ ID NO:3304 is the determined cDNA sequence of clone 63231825

[3345] SEQ ID NO:3305 is the determined cDNA sequence of clone 63250511

[3346] SEQ ID NO:3306 is the determined cDNA sequence of clone 63250512

[3347] SEQ ID NO:3307 is the determined cDNA sequence of clone 63250513

[3348] SEQ ID NO:3308 is the determined cDNA sequence of clone 63250514

[3349] SEQ ID NO:3309 is the determined cDNA sequence of clone 63250516

[3350] SEQ ID NO:3310 is the determined cDNA sequence of clone 63250517

[3351] SEQ ID NO:3311 is the determined cDNA sequence of clone 63250518

[3352] SEQ ID NO:3312 is the determined cDNA sequence of clone 63250519

[3353] SEQ ID NO:3313 is the determined cDNA sequence of clone 63250520

[3354] SEQ ID NO:3314 is the determined cDNA sequence of clone 63250521

[3355] SEQ ID NO:3315 is the determined cDNA sequence of clone 63250525

[3356] SEQ ID NO:3316 is the determined cDNA sequence of clone 63250526

[3357] SEQ ID NO:3317 is the determined cDNA sequence of clone 63250527

[3358] SEQ ID NO:3318 is the determined cDNA sequence of clone 63250528

[3359] SEQ ID NO:3319 is the determined cDNA sequence of clone 63250529

[3360] SEQ ID NO:3320 is the determined cDNA sequence of clone 63250530

[3361] SEQ ID NO:3321 is the determined cDNA sequence of clone 63250531

[3362] SEQ ID NO:3322 is the determined cDNA sequence of clone 63250532

[3363] SEQ ID NO:3323 is the determined cDNA sequence of clone 63250533

[3364] SEQ ID NO:3324 is the determined cDNA sequence of clone 63250535

[3365] SEQ ID NO:3325 is the determined cDNA sequence of clone 63250536

[3366] SEQ ID NO:3326 is the determined cDNA sequence of clone 63250537

[3367] SEQ ID NO:3327 is the determined cDNA sequence of clone 63250538

[3368] SEQ ID NO:3328 is the determined cDNA sequence of clone 63250540

[3369] SEQ ID NO:3329 is the determined cDNA sequence of clone 63250541

[3370] SEQ ID NO:3330 is the determined cDNA sequence of clone 63250542

[3371] SEQ ID NO:3331 is the determined cDNA sequence of clone 63250543

[3372] SEQ ID NO:3332 is the determined cDNA sequence of clone 63250544

[3373] SEQ ID NO:3333 is the determined cDNA sequence of clone 63250545

[3374] SEQ ID NO:3334 is the determined cDNA sequence of clone 63250546

[3375] SEQ ID NO:3335 is the determined cDNA sequence of clone 63250547

[3376] SEQ ID NO:3336 is the determined cDNA sequence of clone 63250548

[3377] SEQ ID NO:3337 is the determined cDNA sequence of clone 63250549

[3378] SEQ ID NO:3338 is the determined cDNA sequence of clone 63250550

[3379] SEQ ID NO:3339 is the determined cDNA sequence of clone 63250551

[3380] SEQ ID NO:3340 is the determined cDNA sequence of clone 63250552

[3381] SEQ ID NO:3341 is the determined cDNA sequence of clone 63250553

[3382] SEQ ID NO:3342 is the determined cDNA sequence of clone 63250554

[3383] SEQ ID NO:3343 is the determined cDNA sequence of clone 63250555

[3384] SEQ ID NO:3344 is the determined cDNA sequence of clone 63250556

[3385] SEQ ID NO:3345 is the determined cDNA sequence of clone 63250558

[3386] SEQ ID NO:3346 is the determined cDNA sequence of clone 63250559

[3387] SEQ ID NO:3347 is the determined cDNA sequence of clone 63250560

[3388] SEQ ID NO:3348 is the determined cDNA sequence of clone 63250561

[3389] SEQ ID NO:3349 is the determined cDNA sequence of clone 63250562

[3390] SEQ ID NO:3350 is the determined cDNA sequence of clone 63250563

[3391] SEQ ID NO:3351 is the determined cDNA sequence of clone 63250564

[3392] SEQ ID NO:3352 is the determined cDNA sequence of clone 63250566

[3393] SEQ ID NO:3353 is the determined cDNA sequence of clone 63250567

[3394] SEQ ID NO:3354 is the determined cDNA sequence of clone 63250568

[3395] SEQ ID NO:3355 is the determined cDNA sequence of clone 63250569

[3396] SEQ ID NO:3356 is the determined cDNA sequence of clone 63250570

[3397] SEQ ID NO:3357 is the determined cDNA sequence of clone 63250572

[3398] SEQ ID NO:3358 is the determined cDNA sequence of clone 63250573

[3399] SEQ ID NO:3359 is the determined cDNA sequence of clone 63250574

[3400] SEQ ID NO:3360 is the determined cDNA sequence of clone 63250575

[3401] SEQ ID NO:3361 is the determined cDNA sequence of clone 63250576

[3402] SEQ ID NO:3362 is the determined cDNA sequence of clone 63250577

[3403] SEQ ID NO:3363 is the determined cDNA sequence of clone 63250578

[3404] SEQ ID NO:3364 is the determined cDNA sequence of clone 63250579

[3405] SEQ ID NO:3365 is the determined cDNA sequence of clone 63250580

[3406] SEQ ID NO:3366 is the determined cDNA sequence of clone 63250581

[3407] SEQ ID NO:3367 is the determined cDNA sequence of clone 63250582

[3408] SEQ ID NO:3368 is the determined cDNA sequence of clone 63250583

[3409] SEQ ID NO:3369 is the determined cDNA sequence of clone 63250584

[3410] SEQ ID NO:3370 is the determined cDNA sequence of clone 63250585

[3411] SEQ ID NO:3371 is the determined cDNA sequence of clone 63250586

[3412] SEQ ID NO:3372 is the determined cDNA sequence of clone 63250587

[3413] SEQ ID NO:3373 is the determined cDNA sequence of clone 63250588

[3414] SEQ ID NO:3374 is the determined cDNA sequence of clone 63250589

[3415] SEQ ID NO:3375 is the determined cDNA sequence of clone 63250590

[3416] SEQ ID NO:3376 is the determined cDNA sequence of clone 63250591

[3417] SEQ ID NO:3377 is the determined cDNA sequence of clone 63250592

[3418] SEQ ID NO:3378 is the determined cDNA sequence of clone 63250593

[3419] SEQ ID NO:3379 is the determined cDNA sequence of clone 63250594

[3420] SEQ ID NO:3380 is the determined cDNA sequence of clone 63250595

[3421] SEQ ID NO:3381 is the determined cDNA sequence of clone 63250596

[3422] SEQ ID NO:3382 is the determined cDNA sequence of clone 63250597

[3423] SEQ ID NO:3383 is the determined cDNA sequence of clone 63250598

[3424] SEQ ID NO:3384 is the determined cDNA sequence of clone 63250599

[3425] SEQ ID NO:3385 is the determined cDNA sequence of clone 63250600

[3426] SEQ ID NO:3386 is the determined cDNA sequence of clone 63250601

[3427] SEQ ID NO:3387 is the determined cDNA sequence of clone 63250602

[3428] SEQ ID NO:3388 is the determined cDNA sequence of clone 63250603

[3429] SEQ ID NO:3389 is the determined cDNA sequence of clone 63231826

[3430] SEQ ID NO:3390 is the determined cDNA sequence of clone 63231827

[3431] SEQ ID NO:3391 is the determined cDNA sequence of clone 63231828

[3432] SEQ ID NO:3392 is the determined cDNA sequence of clone 63231829

[3433] SEQ ID NO:3393 is the determined cDNA sequence of clone 63231830

[3434] SEQ ID NO:3394 is the determined cDNA sequence of clone 63231831

[3435] SEQ ID NO:3395 is the determined cDNA sequence of clone 63231832

[3436] SEQ ID NO:3396 is the determined cDNA sequence of clone 63231833

[3437] SEQ ID NO:3397 is the determined cDNA sequence of clone 63231834

[3438] SEQ ID NO:3398 is the determined cDNA sequence of clone 63231835

[3439] SEQ ID NO:3399 is the determined cDNA sequence of clone 63231836

[3440] SEQ ID NO:3400 is the determined cDNA sequence of clone 63231837

[3441] SEQ ID NO:3401 is the determined cDNA sequence of clone 63231838

[3442] SEQ ID NO:3402 is the determined cDNA sequence of clone 63231839

[3443] SEQ ID NO:3403 is the determined cDNA sequence of clone 63231840

[3444] SEQ ID NO:3404 is the determined cDNA sequence of clone 63231841

[3445] SEQ ID NO:3405 is the determined cDNA sequence of clone 63231842

[3446] SEQ ID NO:3406 is the determined cDNA sequence of clone 63231843

[3447] SEQ ID NO:3407 is the determined cDNA sequence of clone 63231844

[3448] SEQ ID NO:3408 is the determined cDNA sequence of clone 63231845

[3449] SEQ ID NO:3409 is the determined cDNA sequence of clone 63231846

[3450] SEQ ID NO:3410 is the determined cDNA sequence of clone 63231847

[3451] SEQ ID NO:3411 is the determined cDNA sequence of clone 63231848

[3452] SEQ ID NO:3412 is the determined cDNA sequence of clone 63231849

[3453] SEQ ID NO:3413 is the determined cDNA sequence of clone 63231850

[3454] SEQ ID NO:3414 is the determined cDNA sequence of clone 63231851

[3455] SEQ ID NO:3415 is the determined cDNA sequence of clone 63231852

[3456] SEQ ID NO:3416 is the determined cDNA sequence of clone 63231853

[3457] SEQ ID NO:3417 is the determined cDNA sequence of clone 63231854

[3458] SEQ ID NO:3418 is the determined cDNA sequence of clone 63231855

[3459] SEQ ID NO:3419 is the determined cDNA sequence of clone 63231856

[3460] SEQ ID NO:3420 is the determined cDNA sequence of clone 63231857

[3461] SEQ ID NO:3421 is the determined cDNA sequence of clone 63231858

[3462] SEQ ID NO:3422 is the determined cDNA sequence of clone 63231859

[3463] SEQ ID NO:3423 is the determined cDNA sequence of clone 63231860

[3464] SEQ ID NO:3424 is the determined cDNA sequence of clone 63231861

[3465] SEQ ID NO:3425 is the determined cDNA sequence of clone 63231862

[3466] SEQ ID NO:3426 is the determined cDNA sequence of clone 63231863

[3467] SEQ ID NO:3427 is the determined cDNA sequence of clone 63231864

[3468] SEQ ID NO:3428 is the determined cDNA sequence of clone 63231865

[3469] SEQ ID NO:3429 is the determined cDNA sequence of clone 63231866

[3470] SEQ ID NO:3430 is the determined cDNA sequence of clone 63231867

[3471] SEQ ID NO:3431 is the determined cDNA sequence of clone 63231868

[3472] SEQ ID NO:3432 is the determined cDNA sequence of clone 63231869

[3473] SEQ ID NO:3433 is the determined cDNA sequence of clone 63231871

[3474] SEQ ID NO:3434 is the determined cDNA sequence of clone 63231872

[3475] SEQ ID NO:3435 is the determined cDNA sequence of clone 63231873

[3476] SEQ ID NO:3436 is the determined cDNA sequence of clone 63231875

[3477] SEQ ID NO:3437 is the determined cDNA sequence of clone 63231876

[3478] SEQ ID NO:3438 is the determined cDNA sequence of clone 63231877

[3479] SEQ ID NO:3439 is the determined cDNA sequence of clone 63231878

[3480] SEQ ID NO:3440 is the determined cDNA sequence of clone 63231879

[3481] SEQ ID NO:3441 is the determined cDNA sequence of clone 63231880

[3482] SEQ ID NO:3442 is the determined cDNA sequence of clone 63231881

[3483] SEQ ID NO:3443 is the determined cDNA sequence of clone 63231882

[3484] SEQ ID NO:3444 is the determined cDNA sequence of clone 63231883

[3485] SEQ ID NO:3445 is the determined cDNA sequence of clone 63231884

[3486] SEQ ID NO:3446 is the determined cDNA sequence of clone 63231885

[3487] SEQ ID NO:3447 is the determined cDNA sequence of clone 63231886

[3488] SEQ ID NO:3448 is the determined cDNA sequence of clone 63231887

[3489] SEQ ID NO:3449 is the determined cDNA sequence of clone 63231888

[3490] SEQ ID NO:3450 is the determined cDNA sequence of clone 63231889

[3491] SEQ ID NO:3451 is the determined cDNA sequence of clone 63231890

[3492] SEQ ID NO:3452 is the determined cDNA sequence of clone 63231891

[3493] SEQ ID NO:3453 is the determined cDNA sequence of clone 63231892

[3494] SEQ ID NO:3454 is the determined cDNA sequence of clone 63231893

[3495] SEQ ID NO:3455 is the determined cDNA sequence of clone 63231894

[3496] SEQ ID NO:3456 is the determined cDNA sequence of clone 63231895

[3497] SEQ ID NO:3457 is the determined cDNA sequence of clone 63231898

[3498] SEQ ID NO:3458 is the determined cDNA sequence of clone 63231899

[3499] SEQ ID NO:3459 is the determined cDNA sequence of clone 63231900

[3500] SEQ ID NO:3460 is the determined cDNA sequence of clone 63231901

[3501] SEQ ID NO:3461 is the determined cDNA sequence of clone 63231902

[3502] SEQ ID NO:3462 is the determined cDNA sequence of clone 63231903

[3503] SEQ ID NO:3463 is the determined cDNA sequence of clone 63231904

[3504] SEQ ID NO:3464 is the determined cDNA sequence of clone 63231905

[3505] SEQ ID NO:3465 is the determined cDNA sequence of clone 63231906

[3506] SEQ ID NO:3466 is the determined cDNA sequence of clone 63231907

[3507] SEQ ID NO:3467 is the determined cDNA sequence of clone 63231908

[3508] SEQ ID NO:3468 is the determined cDNA sequence of clone 63231910

[3509] SEQ ID NO:3469 is the determined cDNA sequence of clone 63231911

[3510] SEQ ID NO:3470 is the determined cDNA sequence of clone 63231913

[3511] SEQ ID NO:3471 is the determined cDNA sequence of clone 63231914

[3512] SEQ ID NO:3472 is the determined cDNA sequence of clone 63231915

[3513] SEQ ID NO:3473 is the determined cDNA sequence of clone 63231917

[3514] SEQ ID NO:3474 is the determined cDNA sequence of clone 63231918

[3515] SEQ ID NO:3475 is the determined cDNA sequence of clone 63231548

[3516] SEQ ID NO:3476 is the determined cDNA sequence of clone 63231549

[3517] SEQ ID NO:3477 is the determined cDNA sequence of clone 63231550

[3518] SEQ ID NO:3478 is the determined cDNA sequence of clone 63231551

[3519] SEQ ID NO:3479 is the determined cDNA sequence of clone 63231552

[3520] SEQ ID NO:3480 is the determined cDNA sequence of clone 63231553

[3521] SEQ ID NO:3481 is the determined cDNA sequence of clone 63231554

[3522] SEQ ID NO:3482 is the determined cDNA sequence of clone 63231555

[3523] SEQ ID NO:3483 is the determined cDNA sequence of clone 63231557

[3524] SEQ ID NO:3484 is the determined cDNA sequence of clone 63231558

[3525] SEQ ID NO:3485 is the determined cDNA sequence of clone 63231559

[3526] SEQ ID NO:3486 is the determined cDNA sequence of clone 63231560

[3527] SEQ ID NO:3487 is the determined cDNA sequence of clone 63231561

[3528] SEQ ID NO:3488 is the determined cDNA sequence of clone 63231562

[3529] SEQ ID NO:3489 is the determined cDNA sequence of clone 63231563

[3530] SEQ ID NO:3490 is the determined cDNA sequence of clone 63231564

[3531] SEQ ID NO:3491 is the determined cDNA sequence of clone 63231565

[3532] SEQ ID NO:3492 is the determined cDNA sequence of clone 63231566

[3533] SEQ ID NO:3493 is the determined cDNA sequence of clone 63231567

[3534] SEQ ID NO:3494 is the determined cDNA sequence of clone 63231568

[3535] SEQ ID NO:3495 is the determined cDNA sequence of clone 63231569

[3536] SEQ ID NO:3496 is the determined cDNA sequence of clone 63231571

[3537] SEQ ID NO:3497 is the determined cDNA sequence of clone 63231572

[3538] SEQ ID NO:3498 is the determined cDNA sequence of clone 63231573

[3539] SEQ ID NO:3499 is the determined cDNA sequence of clone 63231574

[3540] SEQ ID NO:3500 is the determined cDNA sequence of clone 63231575

[3541] SEQ ID NO:3501 is the determined cDNA sequence of clone 63231576

[3542] SEQ ID NO:3502 is the determined cDNA sequence of clone 63231577

[3543] SEQ ID NO:3503 is the determined cDNA sequence of clone 63231578

[3544] SEQ ID NO:3504 is the determined cDNA sequence of clone 63231579

[3545] SEQ ID NO:3505 is the determined cDNA sequence of clone 63231580

[3546] SEQ ID NO:3506 is the determined cDNA sequence of clone 63231581

[3547] SEQ ID NO:3507 is the determined cDNA sequence of clone 63231582

[3548] SEQ ID NO:3508 is the determined cDNA sequence of clone 63231583

[3549] SEQ ID NO:3509 is the determined cDNA sequence of clone 63231584

[3550] SEQ ID NO:3510 is the determined cDNA sequence of clone 63231585

[3551] SEQ ID NO:3511 is the determined cDNA sequence of clone 63231586

[3552] SEQ ID NO:3512 is the determined cDNA sequence of clone 63231587

[3553] SEQ ID NO:3513 is the determined cDNA sequence of clone 63231588

[3554] SEQ ID NO:3514 is the determined cDNA sequence of clone 63231589

[3555] SEQ ID NO:3515 is the determined cDNA sequence of clone 63231590

[3556] SEQ ID NO:3516 is the determined cDNA sequence of clone 63231591

[3557] SEQ ID NO:3517 is the determined cDNA sequence of clone 63231592

[3558] SEQ ID NO:3518 is the determined cDNA sequence of clone 63231593

[3559] SEQ ID NO:3519 is the determined cDNA sequence of clone 63231594

[3560] SEQ ID NO:3520 is the determined cDNA sequence of clone 63231595

[3561] SEQ ID NO:3521 is the determined cDNA sequence of clone 63231596

[3562] SEQ ID NO:3522 is the determined cDNA sequence of clone 63231597

[3563] SEQ ID NO:3523 is the determined cDNA sequence of clone 63231598

[3564] SEQ ID NO:3524 is the determined cDNA sequence of clone 63231599

[3565] SEQ ID NO:3525 is the determined cDNA sequence of clone 63231600

[3566] SEQ ID NO:3526 is the determined cDNA sequence of clone 63231601

[3567] SEQ ID NO:3527 is the determined cDNA sequence of clone 63231602

[3568] SEQ ID NO:3528 is the determined cDNA sequence of clone 63231603

[3569] SEQ ID NO:3529 is the determined cDNA sequence of clone 63231604

[3570] SEQ ID NO:3530 is the determined cDNA sequence of clone 63231605

[3571] SEQ ID NO:3531 is the determined cDNA sequence of clone 63231606

[3572] SEQ ID NO:3532 is the determined cDNA sequence of clone 63231607

[3573] SEQ ID NO:3533 is the determined cDNA sequence of clone 63231608

[3574] SEQ ID NO:3534 is the determined cDNA sequence of clone 63231609

[3575] SEQ ID NO:3535 is the determined cDNA sequence of clone 63231610

[3576] SEQ ID NO:3536 is the determined cDNA sequence of clone 63231611

[3577] SEQ ID NO:3537 is the determined cDNA sequence of clone 63231612

[3578] SEQ ID NO:3538 is the determined cDNA sequence of clone 63231613

[3579] SEQ ID NO:3539 is the determined cDNA sequence of clone 63231614

[3580] SEQ ID NO:3540 is the determined cDNA sequence of clone 63231615

[3581] SEQ ID NO:3541 is the determined cDNA sequence of clone 63231616

[3582] SEQ ID NO:3542 is the determined cDNA sequence of clone 63231617

[3583] SEQ ID NO:3543 is the determined cDNA sequence of clone 63231618

[3584] SEQ ID NO:3544 is the determined cDNA sequence of clone 63231619

[3585] SEQ ID NO:3545 is the determined cDNA sequence of clone 63231620

[3586] SEQ ID NO:3546 is the determined cDNA sequence of clone 63231621

[3587] SEQ ID NO:3547 is the determined cDNA sequence of clone 63231623

[3588] SEQ ID NO:3548 is the determined cDNA sequence of clone 63231625

[3589] SEQ ID NO:3549 is the determined cDNA sequence of clone 63231626

[3590] SEQ ID NO:3550 is the determined cDNA sequence of clone 63231627

[3591] SEQ ID NO:3551 is the determined cDNA sequence of clone 63231628

[3592] SEQ ID NO:3552 is the determined cDNA sequence of clone 63231629

[3593] SEQ ID NO:3553 is the determined cDNA sequence of clone 63231630

[3594] SEQ ID NO:3554 is the determined cDNA sequence of clone 63231631

[3595] SEQ ID NO:3555 is the determined cDNA sequence of clone 63231632

[3596] SEQ ID NO:3556 is the determined cDNA sequence of clone 63231633

[3597] SEQ ID NO:3557 is the determined cDNA sequence of clone 63231634

[3598] SEQ ID NO:3558 is the determined cDNA sequence of clone 63231635

[3599] SEQ ID NO:3559 is the determined cDNA sequence of clone 63231636

[3600] SEQ ID NO:3560 is the determined cDNA sequence of clone 63231637

[3601] SEQ ID NO:3561 is the determined cDNA sequence of clone 63231638

[3602] SEQ ID NO:3562 is the determined cDNA sequence of clone 63231639

[3603] SEQ ID NO:3563 is the determined cDNA sequence of clone 63298237

[3604] SEQ ID NO:3564 is the determined cDNA sequence of clone 63298238

[3605] SEQ ID NO:3565 is the determined cDNA sequence of clone 63298239

[3606] SEQ ID NO:3566 is the determined cDNA sequence of clone 63298240

[3607] SEQ ID NO:3567 is the determined cDNA sequence of clone 63298241

[3608] SEQ ID NO:3568 is the determined cDNA sequence of clone 63298242

[3609] SEQ ID NO:3569 is the determined cDNA sequence of clone 63298243

[3610] SEQ ID NO:3570 is the determined cDNA sequence of clone 63298244

[3611] SEQ ID NO:3571 is the determined cDNA sequence of clone 63298245

[3612] SEQ ID NO:3572 is the determined cDNA sequence of clone 63298246

[3613] SEQ ID NO:3573 is the determined cDNA sequence of clone 63298247

[3614] SEQ ID NO:3574 is the determined cDNA sequence of clone 63298248

[3615] SEQ ID NO:3575 is the determined cDNA sequence of clone 63298249

[3616] SEQ ID NO:3576 is the determined cDNA sequence of clone 63298250

[3617] SEQ ID NO:3577 is the determined cDNA sequence of clone 63298251

[3618] SEQ ID NO:3578 is the determined cDNA sequence of clone 63298252

[3619] SEQ ID NO:3579 is the determined cDNA sequence of clone 63298253

[3620] SEQ ID NO:3580 is the determined cDNA sequence of clone 63298254

[3621] SEQ ID NO:3581 is the determined cDNA sequence of clone 63298255

[3622] SEQ ID NO:3582 is the determined cDNA sequence of clone 63298256

[3623] SEQ ID NO:3583 is the determined cDNA sequence of clone 63298257

[3624] SEQ ID NO:3584 is the determined cDNA sequence of clone 63298258

[3625] SEQ ID NO:3585 is the determined cDNA sequence of clone 63298259

[3626] SEQ ID NO:3586 is the determined cDNA sequence of clone 63298261

[3627] SEQ ID NO:3587 is the determined cDNA sequence of clone 63298262

[3628] SEQ ID NO:3588 is the determined cDNA sequence of clone 63298263

[3629] SEQ ID NO:3589 is the determined cDNA sequence of clone 63298264

[3630] SEQ ID NO:3590 is the determined cDNA sequence of clone 63298265

[3631] SEQ ID NO:3591 is the determined cDNA sequence of clone 63298266

[3632] SEQ ID NO:3592 is the determined cDNA sequence of clone 63298267

[3633] SEQ ID NO:3593 is the determined cDNA sequence of clone 63298268

[3634] SEQ ID NO:3594 is the determined cDNA sequence of clone 63298269

[3635] SEQ ID NO:3595 is the determined cDNA sequence of clone 63298270

[3636] SEQ ID NO:3596 is the determined cDNA sequence of clone 63298271

[3637] SEQ ID NO:3597 is the determined cDNA sequence of clone 63298273

[3638] SEQ ID NO:3598 is the determined cDNA sequence of clone 63298274

[3639] SEQ ID NO:3599 is the determined cDNA sequence of clone 63298275

[3640] SEQ ID NO:3600 is the determined cDNA sequence of clone 63298276

[3641] SEQ ID NO:3601 is the determined cDNA sequence of clone 63298278

[3642] SEQ ID NO:3602 is the determined cDNA sequence of clone 63298279

[3643] SEQ ID NO:3603 is the determined cDNA sequence of clone 63298280

[3644] SEQ ID NO:3604 is the determined cDNA sequence of clone 63298281

[3645] SEQ ID NO:3605 is the determined cDNA sequence of clone 63298282

[3646] SEQ ID NO:3606 is the determined cDNA sequence of clone 63298284

[3647] SEQ ID NO:3607 is the determined cDNA sequence of clone 63298287

[3648] SEQ ID NO:3608 is the determined cDNA sequence of clone 63298288

[3649] SEQ ID NO:3609 is the determined cDNA sequence of clone 63298289

[3650] SEQ ID NO:3610 is the determined cDNA sequence of clone 63298290

[3651] SEQ ID NO:3611 is the determined cDNA sequence of clone 63298291

[3652] SEQ ID NO:3612 is the determined cDNA sequence of clone 63298292

[3653] SEQ ID NO:3613 is the determined cDNA sequence of clone 63298293

[3654] SEQ ID NO:3614 is the determined cDNA sequence of clone 63298294

[3655] SEQ ID NO:3615 is the determined cDNA sequence of clone 63298295

[3656] SEQ ID NO:3616 is the determined cDNA sequence of clone 63298296

[3657] SEQ ID NO:3617 is the determined cDNA sequence of clone 63298297

[3658] SEQ ID NO:3618 is the determined cDNA sequence of clone 63298299

[3659] SEQ ID NO:3619 is the determined cDNA sequence of clone 63298300

[3660] SEQ ID NO:3620 is the determined cDNA sequence of clone 63298301

[3661] SEQ ID NO:3621 is the determined cDNA sequence of clone 63298303

[3662] SEQ ID NO:3622 is the determined cDNA sequence of clone 63298304

[3663] SEQ ID NO:3623 is the determined cDNA sequence of clone 63298307

[3664] SEQ ID NO:3624 is the determined cDNA sequence of clone 63298308

[3665] SEQ ID NO:3625 is the determined cDNA sequence of clone 63298309

[3666] SEQ ID NO:3626 is the determined cDNA sequence of clone 63298310

[3667] SEQ ID NO:3627 is the determined cDNA sequence of clone 63298311

[3668] SEQ ID NO:3628 is the determined cDNA sequence of clone 63298313

[3669] SEQ ID NO:3629 is the determined cDNA sequence of clone 63298314

[3670] SEQ ID NO:3630 is the determined cDNA sequence of clone 63298315

[3671] SEQ ID NO:3631 is the determined cDNA sequence of clone 63298316

[3672] SEQ ID NO:3632 is the determined cDNA sequence of clone 63298317

[3673] SEQ ID NO:3633 is the determined cDNA sequence of clone 63298318

[3674] SEQ ID NO:3634 is the determined cDNA sequence of clone 63298319

[3675] SEQ ID NO:3635 is the determined cDNA sequence of clone 63298321

[3676] SEQ ID NO:3636 is the determined cDNA sequence of clone 63298323

[3677] SEQ ID NO:3637 is the determined cDNA sequence of clone 63298324

[3678] SEQ ID NO:3638 is the determined cDNA sequence of clone 63298325

[3679] SEQ ID NO:3639 is the determined cDNA sequence of clone 63298326

[3680] SEQ ID NO:3640 is the determined cDNA sequence of clone 63298327

[3681] SEQ ID NO:3641 is the determined cDNA sequence of clone 63298328

[3682] SEQ ID NO:3642 is the determined cDNA sequence of clone 63298329

[3683] SEQ ID NO:3643 is the determined cDNA sequence of clone 63298424

[3684] SEQ ID NO:3644 is the determined cDNA sequence of clone 63298425

[3685] SEQ ID NO:3645 is the determined cDNA sequence of clone 63298426

[3686] SEQ ID NO:3646 is the determined cDNA sequence of clone 63298427

[3687] SEQ ID NO:3647 is the determined cDNA sequence of clone 63298428

[3688] SEQ ID NO:3648 is the determined cDNA sequence of clone 63298429

[3689] SEQ ID NO:3649 is the determined cDNA sequence of clone 63298430

[3690] SEQ ID NO:3650 is the determined cDNA sequence of clone 63298431

[3691] SEQ ID NO:3651 is the determined cDNA sequence of clone 63298432

[3692] SEQ ID NO:3652 is the determined cDNA sequence of clone 63298433

[3693] SEQ ID NO:3653 is the determined cDNA sequence of clone 63298434

[3694] SEQ ID NO:3654 is the determined cDNA sequence of clone 63298435

[3695] SEQ ID NO:3655 is the determined cDNA sequence of clone 63298436

[3696] SEQ ID NO:3656 is the determined cDNA sequence of clone 63298437

[3697] SEQ ID NO:3657 is the determined cDNA sequence of clone 63298438

[3698] SEQ ID NO:3658 is the determined cDNA sequence of clone 63298439

[3699] SEQ ID NO:3659 is the determined cDNA sequence of clone 63298440

[3700] SEQ ID NO:3660 is the determined cDNA sequence of clone 63298441

[3701] SEQ ID NO:3661 is the determined cDNA sequence of clone 63298443

[3702] SEQ ID NO:3662 is the determined cDNA sequence of clone 63298444

[3703] SEQ ID NO:3663 is the determined cDNA sequence of clone 63298445

[3704] SEQ ID NO:3664 is the determined cDNA sequence of clone 63298446

[3705] SEQ ID NO:3665 is the determined cDNA sequence of clone 63298447

[3706] SEQ ID NO:3666 is the determined cDNA sequence of clone 63298448

[3707] SEQ ID NO:3667 is the determined cDNA sequence of clone 63298449

[3708] SEQ ID NO:3668 is the determined cDNA sequence of clone 63298451

[3709] SEQ ID NO:3669 is the determined cDNA sequence of clone 63298452

[3710] SEQ ID NO:3670 is the determined cDNA sequence of clone 63298453

[3711] SEQ ID NO:3671 is the determined cDNA sequence of clone 63298454

[3712] SEQ ID NO:3672 is the determined cDNA sequence of clone 63298455

[3713] SEQ ID NO:3673 is the determined cDNA sequence of clone 63298456

[3714] SEQ ID NO:3674 is the determined cDNA sequence of clone 63298457

[3715] SEQ ID NO:3675 is the determined cDNA sequence of clone 63298458

[3716] SEQ ID NO:3676 is the determined cDNA sequence of clone 63298459

[3717] SEQ ID NO:3677 is the determined cDNA sequence of clone 63298460

[3718] SEQ ID NO:3678 is the determined cDNA sequence of clone 63298461

[3719] SEQ ID NO:3679 is the determined cDNA sequence of clone 63298462

[3720] SEQ ID NO:3680 is the determined cDNA sequence of clone 63298463

[3721] SEQ ID NO:3681 is the determined cDNA sequence of clone 63298464

[3722] SEQ ID NO:3682 is the determined cDNA sequence of clone 63298465

[3723] SEQ ID NO:3683 is the determined cDNA sequence of clone 63298466

[3724] SEQ ID NO:3684 is the determined cDNA sequence of clone 63298468

[3725] SEQ ID NO:3685 is the determined cDNA sequence of clone 63298469

[3726] SEQ ID NO:3686 is the determined cDNA sequence of clone 63298470

[3727] SEQ ID NO:3687 is the determined cDNA sequence of clone 63298471

[3728] SEQ ID NO:3688 is the determined cDNA sequence of clone 63298472

[3729] SEQ ID NO:3689 is the determined cDNA sequence of clone 63298473

[3730] SEQ ID NO:3690 is the determined cDNA sequence of clone 63298474

[3731] SEQ ID NO:3691 is the determined cDNA sequence of clone 63298475

[3732] SEQ ID NO:3692 is the determined cDNA sequence of clone 63298476

[3733] SEQ ID NO:3693 is the determined cDNA sequence of clone 63298477

[3734] SEQ ID NO:3694 is the determined cDNA sequence of clone 63298478

[3735] SEQ ID NO:3695 is the determined cDNA sequence of clone 63298481

[3736] SEQ ID NO:3696 is the determined cDNA sequence of clone 63298482

[3737] SEQ ID NO:3697 is the determined cDNA sequence of clone 63298483

[3738] SEQ ID NO:3698 is the determined cDNA sequence of clone 63298484

[3739] SEQ ID NO:3699 is the determined cDNA sequence of clone 63298485

[3740] SEQ ID NO:3700 is the determined cDNA sequence of clone 63298486

[3741] SEQ ID NO:3701 is the determined cDNA sequence of clone 63298487

[3742] SEQ ID NO:3702 is the determined cDNA sequence of clone 63298488

[3743] SEQ ID NO:3703 is the determined cDNA sequence of clone 63298489

[3744] SEQ ID NO:3704 is the determined cDNA sequence of clone 63298490

[3745] SEQ ID NO:3705 is the determined cDNA sequence of clone 63298491

[3746] SEQ ID NO:3706 is the determined cDNA sequence of clone 63298492

[3747] SEQ ID NO:3707 is the determined cDNA sequence of clone 63298493

[3748] SEQ ID NO:3708 is the determined cDNA sequence of clone 63298494

[3749] SEQ ID NO:3709 is the determined cDNA sequence of clone 63298495

[3750] SEQ ID NO:3710 is the determined cDNA sequence of clone 63298496

[3751] SEQ ID NO:3711 is the determined cDNA sequence of clone 63298497

[3752] SEQ ID NO:3712 is the determined cDNA sequence of clone 63298498

[3753] SEQ ID NO:3713 is the determined cDNA sequence of clone 63298499

[3754] SEQ ID NO:3714 is the determined cDNA sequence of clone 63298500

[3755] SEQ ID NO:3715 is the determined cDNA sequence of clone 63298501

[3756] SEQ ID NO:3716 is the determined cDNA sequence of clone 63298502

[3757] SEQ ID NO:3717 is the determined cDNA sequence of clone 63298504

[3758] SEQ ID NO:3718 is the determined cDNA sequence of clone 63298505

[3759] SEQ ID NO:3719 is the determined cDNA sequence of clone 63298506

[3760] SEQ ID NO:3720 is the determined cDNA sequence of clone 63298507

[3761] SEQ ID NO:3721 is the determined cDNA sequence of clone 63298508

[3762] SEQ ID NO:3722 is the determined cDNA sequence of clone 63298509

[3763] SEQ ID NO:3723 is the determined cDNA sequence of clone 63298510

[3764] SEQ ID NO:3724 is the determined cDNA sequence of clone 63298511

[3765] SEQ ID NO:3725 is the determined cDNA sequence of clone 63298512

[3766] SEQ ID NO:3726 is the determined cDNA sequence of clone 63298513

[3767] SEQ ID NO:3727 is the determined cDNA sequence of clone 63298514

[3768] SEQ ID NO:3728 is the determined cDNA sequence of clone 63298515

[3769] SEQ ID NO:3729 is the determined cDNA sequence of clone 63299075

[3770] SEQ ID NO:3730 is the determined cDNA sequence of clone 63299076

[3771] SEQ ID NO:3731 is the determined cDNA sequence of clone 63299077

[3772] SEQ ID NO:3732 is the determined cDNA sequence of clone 63299078

[3773] SEQ ID NO:3733 is the determined cDNA sequence of clone 63299079

[3774] SEQ ID NO:3734 is the determined cDNA sequence of clone 63299080

[3775] SEQ ID NO:3735 is the determined cDNA sequence of clone 63299081

[3776] SEQ ID NO:3736 is the determined cDNA sequence of clone 63299082

[3777] SEQ ID NO:3737 is the determined cDNA sequence of clone 63299083

[3778] SEQ ID NO:3738 is the determined cDNA sequence of clone 63299084

[3779] SEQ ID NO:3739 is the determined cDNA sequence of clone 63299085

[3780] SEQ ID NO:3740 is the determined cDNA sequence of clone 63299086

[3781] SEQ ID NO:3741 is the determined cDNA sequence of clone 63299087

[3782] SEQ ID NO:3742 is the determined cDNA sequence of clone 63299088

[3783] SEQ ID NO:3743 is the determined cDNA sequence of clone 63299089

[3784] SEQ ID NO:3744 is the determined cDNA sequence of clone 63299090

[3785] SEQ ID NO:3745 is the determined cDNA sequence of clone 63299092

[3786] SEQ ID NO:3746 is the determined cDNA sequence of clone 63299093

[3787] SEQ ID NO:3747 is the determined cDNA sequence of clone 63299094

[3788] SEQ ID NO:3748 is the determined cDNA sequence of clone 63299095

[3789] SEQ ID NO:3749 is the determined cDNA sequence of clone 63299096

[3790] SEQ ID NO:3750 is the determined cDNA sequence of clone 63299097

[3791] SEQ ID NO:3751 is the determined cDNA sequence of clone 63299099

[3792] SEQ ID NO:3752 is the determined cDNA sequence of clone 63299100

[3793] SEQ ID NO:3753 is the determined cDNA sequence of clone 63299101

[3794] SEQ ID NO:3754 is the determined cDNA sequence of clone 63299102

[3795] SEQ ID NO:3755 is the determined cDNA sequence of clone 63299104

[3796] SEQ ID NO:3756 is the determined cDNA sequence of clone 63299105

[3797] SEQ ID NO:3757 is the determined cDNA sequence of clone 63299106

[3798] SEQ ID NO:3758 is the determined cDNA sequence of clone 63299107

[3799] SEQ ID NO:3759 is the determined cDNA sequence of clone 63299108

[3800] SEQ ID NO:3760 is the determined cDNA sequence of clone 63299109

[3801] SEQ ID NO:3761 is the determined cDNA sequence of clone 63299110

[3802] SEQ ID NO:3762 is the determined cDNA sequence of clone 63299111

[3803] SEQ ID NO:3763 is the determined cDNA sequence of clone 63299112

[3804] SEQ ID NO:3764 is the determined cDNA sequence of clone 63299113

[3805] SEQ ID NO:3765 is the determined cDNA sequence of clone 63299114

[3806] SEQ ID NO:3766 is the determined cDNA sequence of clone 63299116

[3807] SEQ ID NO:3767 is the determined cDNA sequence of clone 63299117

[3808] SEQ ID NO:3768 is the determined cDNA sequence of clone 63299118

[3809] SEQ ID NO:3769 is the determined cDNA sequence of clone 63299120

[3810] SEQ ID NO:3770 is the determined cDNA sequence of clone 63299122

[3811] SEQ ID NO:3771 is the determined cDNA sequence of clone 63299123

[3812] SEQ ID NO:3772 is the determined cDNA sequence of clone 63299125

[3813] SEQ ID NO:3773 is the determined cDNA sequence of clone 63299126

[3814] SEQ ID NO:3774 is the determined cDNA sequence of clone 63299128

[3815] SEQ ID NO:3775 is the determined cDNA sequence of clone 63299129

[3816] SEQ ID NO:3776 is the determined cDNA sequence of clone 63299130

[3817] SEQ ID NO:3777 is the determined cDNA sequence of clone 63299131

[3818] SEQ ID NO:3778 is the determined cDNA sequence of clone 63299132

[3819] SEQ ID NO:3779 is the determined cDNA sequence of clone 63299134

[3820] SEQ ID NO:3780 is the determined cDNA sequence of clone 63299135

[3821] SEQ ID NO:3781 is the determined cDNA sequence of clone 63299136

[3822] SEQ ID NO:3782 is the determined cDNA sequence of clone 63299137

[3823] SEQ ID NO:3783 is the determined cDNA sequence of clone 63299138

[3824] SEQ ID NO:3784 is the determined cDNA sequence of clone 63299139

[3825] SEQ ID NO:3785 is the determined cDNA sequence of clone 63299140

[3826] SEQ ID NO:3786 is the determined cDNA sequence of clone 63299141

[3827] SEQ ID NO:3787 is the determined cDNA sequence of clone 63299142

[3828] SEQ ID NO:3788 is the determined cDNA sequence of clone 63299143

[3829] SEQ ID NO:3789 is the determined cDNA sequence of clone 63299144

[3830] SEQ ID NO:3790 is the determined cDNA sequence of clone 63299146

[3831] SEQ ID NO:3791 is the determined cDNA sequence of clone 63299147

[3832] SEQ ID NO:3792 is the determined cDNA sequence of clone 63299148

[3833] SEQ ID NO:3793 is the determined cDNA sequence of clone 63299152

[3834] SEQ ID NO:3794 is the determined cDNA sequence of clone 63299153

[3835] SEQ ID NO:3795 is the determined cDNA sequence of clone 63299155

[3836] SEQ ID NO:3796 is the determined cDNA sequence of clone 63299156

[3837] SEQ ID NO:3797 is the determined cDNA sequence of clone 63299157

[3838] SEQ ID NO:3798 is the determined cDNA sequence of clone 63299158

[3839] SEQ ID NO:3799 is the determined cDNA sequence of clone 63299159

[3840] SEQ ID NO:3800 is the determined cDNA sequence of clone 63299160

[3841] SEQ ID NO:3801 is the determined cDNA sequence of clone 63299164

[3842] SEQ ID NO:3802 is the determined cDNA sequence of clone 63299165

[3843] SEQ ID NO:3803 is the determined cDNA sequence of clone 63299166

[3844] SEQ ID NO:3804 is the determined cDNA sequence of clone 63298889

[3845] SEQ ID NO:3805 is the determined cDNA sequence of clone 63298890

[3846] SEQ ID NO:3806 is the determined cDNA sequence of clone 63298891

[3847] SEQ ID NO:3807 is the determined cDNA sequence of clone 63298892

[3848] SEQ ID NO:3808 is the determined cDNA sequence of clone 63298893

[3849] SEQ ID NO:3809 is the determined cDNA sequence of clone 63298894

[3850] SEQ ID NO:3810 is the determined cDNA sequence of clone 63298895

[3851] SEQ ID NO:3811 is the determined cDNA sequence of clone 63298896

[3852] SEQ ID NO:3812 is the determined cDNA sequence of clone 63298897

[3853] SEQ ID NO:3813 is the determined cDNA sequence of clone 63298898

[3854] SEQ ID NO:3814 is the determined cDNA sequence of clone 63298899

[3855] SEQ ID NO:3815 is the determined cDNA sequence of clone 63298900

[3856] SEQ ID NO:3816 is the determined cDNA sequence of clone 63298901

[3857] SEQ ID NO:3817 is the determined cDNA sequence of clone 63298902

[3858] SEQ ID NO:3818 is the determined cDNA sequence of clone 63298905

[3859] SEQ ID NO:3819 is the determined cDNA sequence of clone 63298906

[3860] SEQ ID NO:3820 is the determined cDNA sequence of clone 63298907

[3861] SEQ ID NO:3821 is the determined cDNA sequence of clone 63298908

[3862] SEQ ID NO:3822 is the determined cDNA sequence of clone 63298909

[3863] SEQ ID NO:3823 is the determined cDNA sequence of clone 63298911

[3864] SEQ ID NO:3824 is the determined cDNA sequence of clone 63298912

[3865] SEQ ID NO:3825 is the determined cDNA sequence of clone 63298913

[3866] SEQ ID NO:3826 is the determined cDNA sequence of clone 63298914

[3867] SEQ ID NO:3827 is the determined cDNA sequence of clone 63298915

[3868] SEQ ID NO:3828 is the determined cDNA sequence of clone 63298917

[3869] SEQ ID NO:3829 is the determined cDNA sequence of clone 63298918

[3870] SEQ ID NO:3830 is the determined cDNA sequence of clone 63298920

[3871] SEQ ID NO:3831 is the determined cDNA sequence of clone 63298921

[3872] SEQ ID NO:3832 is the determined cDNA sequence of clone 63298922

[3873] SEQ ID NO:3833 is the determined cDNA sequence of clone 63298923

[3874] SEQ ID NO:3834 is the determined cDNA sequence of clone 63298924

[3875] SEQ ID NO:3835 is the determined cDNA sequence of clone 63298926

[3876] SEQ ID NO:3836 is the determined cDNA sequence of clone 63298928

[3877] SEQ ID NO:3837 is the determined cDNA sequence of clone 63298930

[3878] SEQ ID NO:3838 is the determined cDNA sequence of clone 63298931

[3879] SEQ ID NO:3839 is the determined cDNA sequence of clone 63298932

[3880] SEQ ID NO:3840 is the determined cDNA sequence of clone 63298933

[3881] SEQ ID NO:3841 is the determined cDNA sequence of clone 63298934

[3882] SEQ ID NO:3842 is the determined cDNA sequence of clone 63298935

[3883] SEQ ID NO:3843 is the determined cDNA sequence of clone 63298936

[3884] SEQ ID NO:3844 is the determined cDNA sequence of clone 63298937

[3885] SEQ ID NO:3845 is the determined cDNA sequence of clone 63298938

[3886] SEQ ID NO:3846 is the determined cDNA sequence of clone 63298939

[3887] SEQ ID NO:3847 is the determined cDNA sequence of clone 63298940

[3888] SEQ ID NO:3848 is the determined cDNA sequence of clone 63298941

[3889] SEQ ID NO:3849 is the determined cDNA sequence of clone 63298942

[3890] SEQ ID NO:3850 is the determined cDNA sequence of clone 63298943

[3891] SEQ ID NO:3851 is the determined cDNA sequence of clone 63298944

[3892] SEQ ID NO:3852 is the determined cDNA sequence of clone 63298945

[3893] SEQ ID NO:3853 is the determined cDNA sequence of clone 63298946

[3894] SEQ ID NO:3854 is the determined cDNA sequence of clone 63298947

[3895] SEQ ID NO:3855 is the determined cDNA sequence of clone 63298948

[3896] SEQ ID NO:3856 is the determined cDNA sequence of clone 63298951

[3897] SEQ ID NO:3857 is the determined cDNA sequence of clone 63298952

[3898] SEQ ID NO:3858 is the determined cDNA sequence of clone 63298954

[3899] SEQ ID NO:3859 is the determined cDNA sequence of clone 63298957

[3900] SEQ ID NO:3860 is the determined cDNA sequence of clone 63298959

[3901] SEQ ID NO:3861 is the determined cDNA sequence of clone 63298960

[3902] SEQ ID NO:3862 is the determined cDNA sequence of clone 63298961

[3903] SEQ ID NO:3863 is the determined cDNA sequence of clone 63298962

[3904] SEQ ID NO:3864 is the determined cDNA sequence of clone 63298963

[3905] SEQ ID NO:3865 is the determined cDNA sequence of clone 63298964

[3906] SEQ ID NO:3866 is the determined cDNA sequence of clone 63298965

[3907] SEQ ID NO:3867 is the determined cDNA sequence of clone 63298966

[3908] SEQ ID NO:3868 is the determined cDNA sequence of clone 63298968

[3909] SEQ ID NO:3869 is the determined cDNA sequence of clone 63298969

[3910] SEQ ID NO:3870 is the determined cDNA sequence of clone 63298970

[3911] SEQ ID NO:3871 is the determined cDNA sequence of clone 63298971

[3912] SEQ ID NO:3872 is the determined cDNA sequence of clone 63298972

[3913] SEQ ID NO:3873 is the determined cDNA sequence of clone 63298973

[3914] SEQ ID NO:3874 is the determined cDNA sequence of clone 63298974

[3915] SEQ ID NO:3875 is the determined cDNA sequence of clone 63298975

[3916] SEQ ID NO:3876 is the determined cDNA sequence of clone 63298977

[3917] SEQ ID NO:3877 is the determined cDNA sequence of clone 63298978

[3918] SEQ ID NO:3878 is the determined cDNA sequence of clone 63298980

[3919] SEQ ID NO:3879 is the determined cDNA sequence of clone 63298330

[3920] SEQ ID NO:3880 is the determined cDNA sequence of clone 63298331

[3921] SEQ ID NO:3881 is the determined cDNA sequence of clone 63298332

[3922] SEQ ID NO:3882 is the determined cDNA sequence of clone 63298333

[3923] SEQ ID NO:3883 is the determined cDNA sequence of clone 63298334

[3924] SEQ ID NO:3884 is the determined cDNA sequence of clone 63298335

[3925] SEQ ID NO:3885 is the determined cDNA sequence of clone 63298336

[3926] SEQ ID NO:3886 is the determined cDNA sequence of clone 63298337

[3927] SEQ ID NO:3887 is the determined cDNA sequence of clone 63298338

[3928] SEQ ID NO:3888 is the determined cDNA sequence of clone 63298339

[3929] SEQ ID NO:3889 is the determined cDNA sequence of clone 63298340

[3930] SEQ ID NO:3890 is the determined cDNA sequence of clone 63298341

[3931] SEQ ID NO:3891 is the determined cDNA sequence of clone 63298342

[3932] SEQ ID NO:3892 is the determined cDNA sequence of clone 63298343

[3933] SEQ ID NO:3893 is the determined cDNA sequence of clone 63298344

[3934] SEQ ID NO:3894 is the determined cDNA sequence of clone 63298345

[3935] SEQ ID NO:3895 is the determined cDNA sequence of clone 63298346

[3936] SEQ ID NO:3896 is the determined cDNA sequence of clone 63298347

[3937] SEQ ID NO:3897 is the determined cDNA sequence of clone 63298348

[3938] SEQ ID NO:3898 is the determined cDNA sequence of clone 63298349

[3939] SEQ ID NO:3899 is the determined cDNA sequence of clone 63298350

[3940] SEQ ID NO:3900 is the determined cDNA sequence of clone 63298352

[3941] SEQ ID NO:3901 is the determined cDNA sequence of clone 63298353

[3942] SEQ ID NO:3902 is the determined cDNA sequence of clone 63298354

[3943] SEQ ID NO:3903 is the determined cDNA sequence of clone 63298355

[3944] SEQ ID NO:3904 is the determined cDNA sequence of clone 63298356

[3945] SEQ ID NO:3905 is the determined cDNA sequence of clone 63298358

[3946] SEQ ID NO:3906 is the determined cDNA sequence of clone 63298359

[3947] SEQ ID NO:3907 is the determined cDNA sequence of clone 63298360

[3948] SEQ ID NO:3908 is the determined cDNA sequence of clone 63298361

[3949] SEQ ID NO:3909 is the determined cDNA sequence of clone 63298363

[3950] SEQ ID NO:3910 is the determined cDNA sequence of clone 63298364

[3951] SEQ ID NO:3911 is the determined cDNA sequence of clone 63298365

[3952] SEQ ID NO:3912 is the determined cDNA sequence of clone 63298366

[3953] SEQ ID NO:3913 is the determined cDNA sequence of clone 63298367

[3954] SEQ ID NO:3914 is the determined cDNA sequence of clone 63298368

[3955] SEQ ID NO:3915 is the determined cDNA sequence of clone 63298370

[3956] SEQ ID NO:3916 is the determined cDNA sequence of clone 63298371

[3957] SEQ ID NO:3917 is the determined cDNA sequence of clone 63298372

[3958] SEQ ID NO:3918 is the determined cDNA sequence of clone 63298373

[3959] SEQ ID NO:3919 is the determined cDNA sequence of clone 63298374

[3960] SEQ ID NO:3920 is the determined cDNA sequence of clone 63298375

[3961] SEQ ID NO:3921 is the determined cDNA sequence of clone 63298376

[3962] SEQ ID NO:3922 is the determined cDNA sequence of clone 63298377

[3963] SEQ ID NO:3923 is the determined cDNA sequence of clone 63298378

[3964] SEQ ID NO:3924 is the determined cDNA sequence of clone 63298379

[3965] SEQ ID NO:3925 is the determined cDNA sequence of clone 63298380

[3966] SEQ ID NO:3926 is the determined cDNA sequence of clone 63298382

[3967] SEQ ID NO:3927 is the determined cDNA sequence of clone 63298383

[3968] SEQ ID NO:3928 is the determined cDNA sequence of clone 63298384

[3969] SEQ ID NO:3929 is the determined cDNA sequence of clone 63298385

[3970] SEQ ID NO:3930 is the determined cDNA sequence of clone 63298386

[3971] SEQ ID NO:3931 is the determined cDNA sequence of clone 63298387

[3972] SEQ ID NO:3932 is the determined cDNA sequence of clone 63298388

[3973] SEQ ID NO:3933 is the determined cDNA sequence of clone 63298389

[3974] SEQ ID NO:3934 is the determined cDNA sequence of clone 63298390

[3975] SEQ ID NO:3935 is the determined cDNA sequence of clone 63298391

[3976] SEQ ID NO:3936 is the determined cDNA sequence of clone 63298392

[3977] SEQ ID NO:3937 is the determined cDNA sequence of clone 63298394

[3978] SEQ ID NO:3938 is the determined cDNA sequence of clone 63298395

[3979] SEQ ID NO:3939 is the determined cDNA sequence of clone 63298396

[3980] SEQ ID NO:3940 is the determined cDNA sequence of clone 63298397

[3981] SEQ ID NO:3941 is the determined cDNA sequence of clone 63298398

[3982] SEQ ID NO:3942 is the determined cDNA sequence of clone 63298399

[3983] SEQ ID NO:3943 is the determined cDNA sequence of clone 63298401

[3984] SEQ ID NO:3944 is the determined cDNA sequence of clone 63298402

[3985] SEQ ID NO:3945 is the determined cDNA sequence of clone 63298403

[3986] SEQ ID NO:3946 is the determined cDNA sequence of clone 63298404

[3987] SEQ ID NO:3947 is the determined cDNA sequence of clone 63298405

[3988] SEQ ID NO:3948 is the determined cDNA sequence of clone 63298406

[3989] SEQ ID NO:3949 is the determined cDNA sequence of clone 63298407

[3990] SEQ ID NO:3950 is the determined cDNA sequence of clone 63298408

[3991] SEQ ID NO:3951 is the determined cDNA sequence of clone 63298409

[3992] SEQ ID NO:3952 is the determined cDNA sequence of clone 63298410

[3993] SEQ ID NO:3953 is the determined cDNA sequence of clone 63298411

[3994] SEQ ID NO:3954 is the determined cDNA sequence of clone 63298412

[3995] SEQ ID NO:3955 is the determined cDNA sequence of clone 63298414

[3996] SEQ ID NO:3956 is the determined cDNA sequence of clone 63298415

[3997] SEQ ID NO:3957 is the determined cDNA sequence of clone 63298416

[3998] SEQ ID NO:3958 is the determined cDNA sequence of clone 63298417

[3999] SEQ ID NO:3959 is the determined cDNA sequence of clone 63298418

[4000] SEQ ID NO:3960 is the determined cDNA sequence of clone 63298419

[4001] SEQ ID NO:3961 is the determined cDNA sequence of clone 63298420

[4002] SEQ ID NO:3962 is the determined cDNA sequence of clone 63298421

[4003] SEQ ID NO:3963 is the determined cDNA sequence of clone 63250604

[4004] SEQ ID NO:3964 is the determined cDNA sequence of clone 63250605

[4005] SEQ ID NO:3965 is the determined cDNA sequence of clone 63250606

[4006] SEQ ID NO:3966 is the determined cDNA sequence of clone 63250607

[4007] SEQ ID NO:3967 is the determined cDNA sequence of clone 63250608

[4008] SEQ ID NO:3968 is the determined cDNA sequence of clone 63250609

[4009] SEQ ID NO:3969 is the determined cDNA sequence of clone 63250610

[4010] SEQ ID NO:3970 is the determined cDNA sequence of clone 63250611

[4011] SEQ ID NO:3971 is the determined cDNA sequence of clone 63250612

[4012] SEQ ID NO:3972 is the determined cDNA sequence of clone 63250613

[4013] SEQ ID NO:3973 is the determined cDNA sequence of clone 63250614

[4014] SEQ ID NO:3974 is the determined cDNA sequence of clone 63250615

[4015] SEQ ID NO:3975 is the determined cDNA sequence of clone 63250616

[4016] SEQ ID NO:3976 is the determined cDNA sequence of clone 63250617

[4017] SEQ ID NO:3977 is the determined cDNA sequence of clone 63250618

[4018] SEQ ID NO:3978 is the determined cDNA sequence of clone 63250619

[4019] SEQ ID NO:3979 is the determined cDNA sequence of clone 63250620

[4020] SEQ ID NO:3980 is the determined cDNA sequence of clone 63250621

[4021] SEQ ID NO:3981 is the determined cDNA sequence of clone 63250622

[4022] SEQ ID NO:3982 is the determined cDNA sequence of clone 63250623

[4023] SEQ ID NO:3983 is the determined cDNA sequence of clone 63250624

[4024] SEQ ID NO:3984 is the determined cDNA sequence of clone 63250625

[4025] SEQ ID NO:3985 is the determined cDNA sequence of clone 63250626

[4026] SEQ ID NO:3986 is the determined cDNA sequence of clone 63250627

[4027] SEQ ID NO:3987 is the determined cDNA sequence of clone 63250628

[4028] SEQ ID NO:3988 is the determined cDNA sequence of clone 63250629

[4029] SEQ ID NO:3989 is the determined cDNA sequence of clone 63250630

[4030] SEQ ID NO:3990 is the determined cDNA sequence of clone 63250631

[4031] SEQ ID NO:3991 is the determined cDNA sequence of clone 63250632

[4032] SEQ ID NO:3992 is the determined cDNA sequence of clone 63250633

[4033] SEQ ID NO:3993 is the determined cDNA sequence of clone 63250634

[4034] SEQ ID NO:3994 is the determined cDNA sequence of clone 63250635

[4035] SEQ ID NO:3995 is the determined cDNA sequence of clone 63250636

[4036] SEQ ID NO:3996 is the determined cDNA sequence of clone 63250637

[4037] SEQ ID NO:3997 is the determined cDNA sequence of clone 63250638

[4038] SEQ ID NO:3998 is the determined cDNA sequence of clone 63250639

[4039] SEQ ID NO:3999 is the determined cDNA sequence of clone 63250640

[4040] SEQ ID NO:4000 is the determined cDNA sequence of clone 63250641

[4041] SEQ ID NO:4001 is the determined cDNA sequence of clone 63250642

[4042] SEQ ID NO:4002 is the determined cDNA sequence of clone 63250643

[4043] SEQ ID NO:4003 is the determined cDNA sequence of clone 63250644

[4044] SEQ ID NO:4004 is the determined cDNA sequence of clone 63250645

[4045] SEQ ID NO:4005 is the determined cDNA sequence of clone 63250646

[4046] SEQ ID NO:4006 is the determined cDNA sequence of clone 63250647

[4047] SEQ ID NO:4007 is the determined cDNA sequence of clone 63250648

[4048] SEQ ID NO:4008 is the determined cDNA sequence of clone 63250649

[4049] SEQ ID NO:4009 is the determined cDNA sequence of clone 63250650

[4050] SEQ ID NO:4010 is the determined cDNA sequence of clone 63250651

[4051] SEQ ID NO:4011 is the determined cDNA sequence of clone 63250652

[4052] SEQ ID NO:4012 is the determined cDNA sequence of clone 63250653

[4053] SEQ ID NO:4013 is the determined cDNA sequence of clone 63250654

[4054] SEQ ID NO:4014 is the determined cDNA sequence of clone 63250656

[4055] SEQ ID NO:4015 is the determined cDNA sequence of clone 63250657

[4056] SEQ ID NO:4016 is the determined cDNA sequence of clone 63250658

[4057] SEQ ID NO:4017 is the determined cDNA sequence of clone 63250660

[4058] SEQ ID NO:4018 is the determined cDNA sequence of clone 63250661

[4059] SEQ ID NO:4019 is the determined cDNA sequence of clone 63250662

[4060] SEQ ID NO:4020 is the determined cDNA sequence of clone 63250663

[4061] SEQ ID NO:4021 is the determined cDNA sequence of clone 63250664

[4062] SEQ ID NO:4022 is the determined cDNA sequence of clone 63250665

[4063] SEQ ID NO:4023 is the determined cDNA sequence of clone 63250667

[4064] SEQ ID NO:4024 is the determined cDNA sequence of clone 63250668

[4065] SEQ ID NO:4025 is the determined cDNA sequence of clone 63250669

[4066] SEQ ID NO:4026 is the determined cDNA sequence of clone 63250670

[4067] SEQ ID NO:4027 is the determined cDNA sequence of clone 63250671

[4068] SEQ ID NO:4028 is the determined cDNA sequence of clone 63250672

[4069] SEQ ID NO:4029 is the determined cDNA sequence of clone 63250673

[4070] SEQ ID NO:4030 is the determined cDNA sequence of clone 63250674

[4071] SEQ ID NO:4031 is the determined cDNA sequence of clone 63250676

[4072] SEQ ID NO:4032 is the determined cDNA sequence of clone 63250677

[4073] SEQ ID NO:4033 is the determined cDNA sequence of clone 63250678

[4074] SEQ ID NO:4034 is the determined cDNA sequence of clone 63250679

[4075] SEQ ID NO:4035 is the determined cDNA sequence of clone 63250681

[4076] SEQ ID NO:4036 is the determined cDNA sequence of clone 63250682

[4077] SEQ ID NO:4037 is the determined cDNA sequence of clone 63250683

[4078] SEQ ID NO:4038 is the determined cDNA sequence of clone 63250684

[4079] SEQ ID NO:4039 is the determined cDNA sequence of clone 63250685

[4080] SEQ ID NO:4040 is the determined cDNA sequence of clone 63250686

[4081] SEQ ID NO:4041 is the determined cDNA sequence of clone 63250687

[4082] SEQ ID NO:4042 is the determined cDNA sequence of clone 63250688

[4083] SEQ ID NO:4043 is the determined cDNA sequence of clone 63250689

[4084] SEQ ID NO:4044 is the determined cDNA sequence of clone 63250690

[4085] SEQ ID NO:4045 is the determined cDNA sequence of clone 63250691

[4086] SEQ ID NO:4046 is the determined cDNA sequence of clone 63250692

[4087] SEQ ID NO:4047 is the determined cDNA sequence of clone 63250693

[4088] SEQ ID NO:4048 is the determined cDNA sequence of clone 63250694

[4089] SEQ ID NO:4049 is the determined cDNA sequence of clone 63250696

[4090] SEQ ID NO:4050 is the determined cDNA sequence of clone 63138129

[4091] SEQ ID NO:4051 is the determined cDNA sequence of clone 63138130

[4092] SEQ ID NO:4052 is the determined cDNA sequence of clone 63138131

[4093] SEQ ID NO:4053 is the determined cDNA sequence of clone 63138132

[4094] SEQ ID NO:4054 is the determined cDNA sequence of clone 63138133

[4095] SEQ ID NO:4055 is the determined cDNA sequence of clone 63138134

[4096] SEQ ID NO:4056 is the determined cDNA sequence of clone 63138135

[4097] SEQ ID NO:4057 is the determined cDNA sequence of clone 63138136

[4098] SEQ ID NO:4058 is the determined cDNA sequence of clone 63138137

[4099] SEQ ID NO:4059 is the determined cDNA sequence of clone 63138138

[4100] SEQ ID NO:4060 is the determined cDNA sequence of clone 63138139

[4101] SEQ ID NO:4061 is the determined cDNA sequence of clone 63138140

[4102] SEQ ID NO:4062 is the determined cDNA sequence of clone 63138141

[4103] SEQ ID NO:4063 is the determined cDNA sequence of clone 63138142

[4104] SEQ ID NO:4064 is the determined cDNA sequence of clone 63138144

[4105] SEQ ID NO:4065 is the determined cDNA sequence of clone 63138145

[4106] SEQ ID NO:4066 is the determined cDNA sequence of clone 63138146

[4107] SEQ ID NO:4067 is the determined cDNA sequence of clone 63138147

[4108] SEQ ID NO:4068 is the determined cDNA sequence of clone 63138148

[4109] SEQ ID NO:4069 is the determined cDNA sequence of clone 63138149

[4110] SEQ ID NO:4070 is the determined cDNA sequence of clone 63138150

[4111] SEQ ID NO:4071 is the determined cDNA sequence of clone 63138151

[4112] SEQ ID NO:4072 is the determined cDNA sequence of clone 63138153

[4113] SEQ ID NO:4073 is the determined cDNA sequence of clone 63138154

[4114] SEQ ID NO:4074 is the determined cDNA sequence of clone 63138155

[4115] SEQ ID NO:4075 is the determined cDNA sequence of clone 63138156

[4116] SEQ ID NO:4076 is the determined cDNA sequence of clone 63138157

[4117] SEQ ID NO:4077 is the determined cDNA sequence of clone 63138158

[4118] SEQ ID NO:4078 is the determined cDNA sequence of clone 63138159

[4119] SEQ ID NO:4079 is the determined cDNA sequence of clone 63138161

[4120] SEQ ID NO:4080 is the determined cDNA sequence of clone 63138162

[4121] SEQ ID NO:4081 is the determined cDNA sequence of clone 63138163

[4122] SEQ ID NO:4082 is the determined cDNA sequence of clone 63138165

[4123] SEQ ID NO:4083 is the determined cDNA sequence of clone 63138166

[4124] SEQ ID NO:4084 is the determined cDNA sequence of clone 63138167

[4125] SEQ ID NO:4085 is the determined cDNA sequence of clone 63138169

[4126] SEQ ID NO:4086 is the determined cDNA sequence of clone 63138170

[4127] SEQ ID NO:4087 is the determined cDNA sequence of clone 63138171

[4128] SEQ ID NO:4088 is the determined cDNA sequence of clone 63138172

[4129] SEQ ID NO:4089 is the determined cDNA sequence of clone 63138173

[4130] SEQ ID NO:4090 is the determined cDNA sequence of clone 63138174

[4131] SEQ ID NO:4091 is the determined cDNA sequence of clone 63138175

[4132] SEQ ID NO:4092 is the determined cDNA sequence of clone 63138176

[4133] SEQ ID NO:4093 is the determined cDNA sequence of clone 63138177

[4134] SEQ ID NO:4094 is the determined cDNA sequence of clone 63138178

[4135] SEQ ID NO:4095 is the determined cDNA sequence of clone 63138179

[4136] SEQ ID NO:4096 is the determined cDNA sequence of clone 63138181

[4137] SEQ ID NO:4097 is the determined cDNA sequence of clone 63138182

[4138] SEQ ID NO:4098 is the determined cDNA sequence of clone 63138183

[4139] SEQ ID NO:4099 is the determined cDNA sequence of clone 63138184

[4140] SEQ ID NO:4100 is the determined cDNA sequence of clone 63138185

[4141] SEQ ID NO:4101 is the determined cDNA sequence of clone 63138186

[4142] SEQ ID NO:4102 is the determined cDNA sequence of clone 63138187

[4143] SEQ ID NO:4103 is the determined cDNA sequence of clone 63138189

[4144] SEQ ID NO:4104 is the determined cDNA sequence of clone 63138191

[4145] SEQ ID NO:4105 is the determined cDNA sequence of clone 63138192

[4146] SEQ ID NO:4106 is the determined cDNA sequence of clone 63138193

[4147] SEQ ID NO:4107 is the determined cDNA sequence of clone 63138194

[4148] SEQ ID NO:4108 is the determined cDNA sequence of clone 63138195

[4149] SEQ ID NO:4109 is the determined cDNA sequence of clone 63138196

[4150] SEQ ID NO:4110 is the determined cDNA sequence of clone 63138197

[4151] SEQ ID NO:4111 is the determined cDNA sequence of clone 63138198

[4152] SEQ ID NO:4112 is the determined cDNA sequence of clone 63138199

[4153] SEQ ID NO:4113 is the determined cDNA sequence of clone 63138201

[4154] SEQ ID NO:4114 is the determined cDNA sequence of clone 63138202

[4155] SEQ ID NO:4115 is the determined cDNA sequence of clone 63138203

[4156] SEQ ID NO:4116 is the determined cDNA sequence of clone 63138204

[4157] SEQ ID NO:4117 is the determined cDNA sequence of clone 63138205

[4158] SEQ ID NO:4118 is the determined cDNA sequence of clone 63138206

[4159] SEQ ID NO:4119 is the determined cDNA sequence of clone 63138208

[4160] SEQ ID NO:4120 is the determined cDNA sequence of clone 63138209

[4161] SEQ ID NO:4121 is the determined cDNA sequence of clone 63138210

[4162] SEQ ID NO:4122 is the determined cDNA sequence of clone 63138211

[4163] SEQ ID NO:4123 is the determined cDNA sequence of clone 63138212

[4164] SEQ ID NO:4124 is the determined cDNA sequence of clone 63138213

[4165] SEQ ID NO:4125 is the determined cDNA sequence of clone 63138214

[4166] SEQ ID NO:4126 is the determined cDNA sequence of clone 63138215

[4167] SEQ ID NO:4127 is the determined cDNA sequence of clone 63138217

[4168] SEQ ID NO:4128 is the determined cDNA sequence of clone 63138218

[4169] SEQ ID NO:4129 is the determined cDNA sequence of clone 63138220

[4170] SEQ ID NO:4130 is the determined cDNA sequence of clone 63138221

[4171] SEQ ID NO:4131 is the determined cDNA sequence of clone 63299167

[4172] SEQ ID NO:4132 is the determined cDNA sequence of clone 63299168

[4173] SEQ ID NO:4133 is the determined cDNA sequence of clone 63299169

[4174] SEQ ID NO:4134 is the determined cDNA sequence of clone 63299171

[4175] SEQ ID NO:4135 is the determined cDNA sequence of clone 63299172

[4176] SEQ ID NO:4136 is the determined cDNA sequence of clone 63299173

[4177] SEQ ID NO:4137 is the determined cDNA sequence of clone 63299174

[4178] SEQ ID NO:4138 is the determined cDNA sequence of clone 63299175

[4179] SEQ ID NO:4139 is the determined cDNA sequence of clone 63299176

[4180] SEQ ID NO:4140 is the determined cDNA sequence of clone 63299177

[4181] SEQ ID NO:4141 is the determined cDNA sequence of clone 63299178

[4182] SEQ ID NO:4142 is the determined cDNA sequence of clone 63299179

[4183] SEQ ID NO:4143 is the determined cDNA sequence of clone 63299180

[4184] SEQ ID NO:4144 is the determined cDNA sequence of clone 63299181

[4185] SEQ ID NO:4145 is the determined cDNA sequence of clone 63299182

[4186] SEQ ID NO:4146 is the determined cDNA sequence of clone 63299183

[4187] SEQ ID NO:4147 is the determined cDNA sequence of clone 63299185

[4188] SEQ ID NO:4148 is the determined cDNA sequence of clone 63299187

[4189] SEQ ID NO:4149 is the determined cDNA sequence of clone 63299188

[4190] SEQ ID NO:4150 is the determined cDNA sequence of clone 63299189

[4191] SEQ ID NO:4151 is the determined cDNA sequence of clone 63299191

[4192] SEQ ID NO:4152 is the determined cDNA sequence of clone 63299193

[4193] SEQ ID NO:4153 is the determined cDNA sequence of clone 63299194

[4194] SEQ ID NO:4154 is the determined cDNA sequence of clone 63299195

[4195] SEQ ID NO:4155 is the determined cDNA sequence of clone 63299197

[4196] SEQ ID NO:4156 is the determined cDNA sequence of clone 63299198

[4197] SEQ ID NO:4157 is the determined cDNA sequence of clone 63299199

[4198] SEQ ID NO:4158 is the determined cDNA sequence of clone 63299200

[4199] SEQ ID NO:4159 is the determined cDNA sequence of clone 63299201

[4200] SEQ ID NO:4160 is the determined cDNA sequence of clone 63299203

[4201] SEQ ID NO:4161 is the determined cDNA sequence of clone 63299204

[4202] SEQ ID NO:4162 is the determined cDNA sequence of clone 63299206

[4203] SEQ ID NO:4163 is the determined cDNA sequence of clone 63299209

[4204] SEQ ID NO:4164 is the determined cDNA sequence of clone 63299210

[4205] SEQ ID NO:4165 is the determined cDNA sequence of clone 63299211

[4206] SEQ ID NO:4166 is the determined cDNA sequence of clone 63299212

[4207] SEQ ID NO:4167 is the determined cDNA sequence of clone 63299213

[4208] SEQ ID NO:4168 is the determined cDNA sequence of clone 63299214

[4209] SEQ ID NO:4169 is the determined cDNA sequence of clone 63299215

[4210] SEQ ID NO:4170 is the determined cDNA sequence of clone 63299216

[4211] SEQ ID NO:4171 is the determined cDNA sequence of clone 63299217

[4212] SEQ ID NO:4172 is the determined cDNA sequence of clone 63299218

[4213] SEQ ID NO:4173 is the determined cDNA sequence of clone 63299221

[4214] SEQ ID NO:4174 is the determined cDNA sequence of clone 63299222

[4215] SEQ ID NO:4175 is the determined cDNA sequence of clone 63299223

[4216] SEQ ID NO:4176 is the determined cDNA sequence of clone 63299224

[4217] SEQ ID NO:4177 is the determined cDNA sequence of clone 63299226

[4218] SEQ ID NO:4178 is the determined cDNA sequence of clone 63299227

[4219] SEQ ID NO:4179 is the determined cDNA sequence of clone 63299228

[4220] SEQ ID NO:4180 is the determined cDNA sequence of clone 63299229

[4221] SEQ ID NO:4181 is the determined cDNA sequence of clone 63299230

[4222] SEQ ID NO:4182 is the determined cDNA sequence of clone 63299231

[4223] SEQ ID NO:4183 is the determined cDNA sequence of clone 63299233

[4224] SEQ ID NO:4184 is the determined cDNA sequence of clone 63299235

[4225] SEQ ID NO:4185 is the determined cDNA sequence of clone 63299236

[4226] SEQ ID NO:4186 is the determined cDNA sequence of clone 63299237

[4227] SEQ ID NO:4187 is the determined cDNA sequence of clone 63299239

[4228] SEQ ID NO:4188 is the determined cDNA sequence of clone 63299240

[4229] SEQ ID NO:4189 is the determined cDNA sequence of clone 63299242

[4230] SEQ ID NO:4190 is the determined cDNA sequence of clone 63299243

[4231] SEQ ID NO:4191 is the determined cDNA sequence of clone 63299245

[4232] SEQ ID NO:4192 is the determined cDNA sequence of clone 63299247

[4233] SEQ ID NO:4193 is the determined cDNA sequence of clone 63299248

[4234] SEQ ID NO:4194 is the determined cDNA sequence of clone 63299249

[4235] SEQ ID NO:4195 is the determined cDNA sequence of clone 63299250

[4236] SEQ ID NO:4196 is the determined cDNA sequence of clone 63299251

[4237] SEQ ID NO:4197 is the determined cDNA sequence of clone 63299252

[4238] SEQ ID NO:4198 is the determined cDNA sequence of clone 63299253

[4239] SEQ ID NO:4199 is the determined cDNA sequence of clone 63299254

[4240] SEQ ID NO:4200 is the determined cDNA sequence of clone 63299256

[4241] SEQ ID NO:4201 is the determined cDNA sequence of clone 63299257

[4242] SEQ ID NO:4202 is the determined cDNA sequence of clone 63299259

[4243] SEQ ID NO:4203 is the determined cDNA sequence of clone 63234997

[4244] SEQ ID NO:4204 is the determined cDNA sequence of clone 63234998

[4245] SEQ ID NO:4205 is the determined cDNA sequence of clone 63234999

[4246] SEQ ID NO:4206 is the determined cDNA sequence of clone 63235000

[4247] SEQ ID NO:4207 is the determined cDNA sequence of clone 63235001

[4248] SEQ ID NO:4208 is the determined cDNA sequence of clone 63235002

[4249] SEQ ID NO:4209 is the determined cDNA sequence of clone 63235003

[4250] SEQ ID NO:4210 is the determined cDNA sequence of clone 63235004

[4251] SEQ ID NO:4211 is the determined cDNA sequence of clone 63235007

[4252] SEQ ID NO:4212 is the determined cDNA sequence of clone 63235008

[4253] SEQ ID NO:4213 is the determined cDNA sequence of clone 63235009

[4254] SEQ ID NO:4214 is the determined cDNA sequence of clone 63235011

[4255] SEQ ID NO:4215 is the determined cDNA sequence of clone 63235012

[4256] SEQ ID NO:4216 is the determined cDNA sequence of clone 63235014

[4257] SEQ ID NO:4217 is the determined cDNA sequence of clone 63235015

[4258] SEQ ID NO:4218 is the determined cDNA sequence of clone 63235016

[4259] SEQ ID NO:4219 is the determined cDNA sequence of clone 63235019

[4260] SEQ ID NO:4220 is the determined cDNA sequence of clone 63235020

[4261] SEQ ID NO:4221 is the determined cDNA sequence of clone 63235021

[4262] SEQ ID NO:4222 is the determined cDNA sequence of clone 63235022

[4263] SEQ ID NO:4223 is the determined cDNA sequence of clone 63235023

[4264] SEQ ID NO:4224 is the determined cDNA sequence of clone 63235024

[4265] SEQ ID NO:4225 is the determined cDNA sequence of clone 63235025

[4266] SEQ ID NO:4226 is the determined cDNA sequence of clone 63235028

[4267] SEQ ID NO:4227 is the determined cDNA sequence of clone 63235029

[4268] SEQ ID NO:4228 is the determined cDNA sequence of clone 63235031

[4269] SEQ ID NO:4229 is the determined cDNA sequence of clone 63235033

[4270] SEQ ID NO:4230 is the determined cDNA sequence of clone 63235034

[4271] SEQ ID NO:4231 is the determined cDNA sequence of clone 63235037

[4272] SEQ ID NO:4232 is the determined cDNA sequence of clone 63235038

[4273] SEQ ID NO:4233 is the determined cDNA sequence of clone 63235039

[4274] SEQ ID NO:4234 is the determined cDNA sequence of clone 63235043

[4275] SEQ ID NO:4235 is the determined cDNA sequence of clone 63235044

[4276] SEQ ID NO:4236 is the determined cDNA sequence of clone 63235045

[4277] SEQ ID NO:4237 is the determined cDNA sequence of clone 63235046

[4278] SEQ ID NO:4238 is the determined cDNA sequence of clone 63235047

[4279] SEQ ID NO:4239 is the determined cDNA sequence of clone 63235048

[4280] SEQ ID NO:4240 is the determined cDNA sequence of clone 63235049

[4281] SEQ ID NO:4241 is the determined cDNA sequence of clone 63235050

[4282] SEQ ID NO:4242 is the determined cDNA sequence of clone 63235051

[4283] SEQ ID NO:4243 is the determined cDNA sequence of clone 63235052

[4284] SEQ ID NO:4244 is the determined cDNA sequence of clone 63235053

[4285] SEQ ID NO:4245 is the determined cDNA sequence of clone 63235056

[4286] SEQ ID NO:4246 is the determined cDNA sequence of clone 63235057

[4287] SEQ ID NO:4247 is the determined cDNA sequence of clone 63235058

[4288] SEQ ID NO:4248 is the determined cDNA sequence of clone 63235059

[4289] SEQ ID NO:4249 is the determined cDNA sequence of clone 63235060

[4290] SEQ ID NO:4250 is the determined cDNA sequence of clone 63235061

[4291] SEQ ID NO:4251 is the determined cDNA sequence of clone 63235062

[4292] SEQ ID NO:4252 is the determined cDNA sequence of clone 63235063

[4293] SEQ ID NO:4253 is the determined cDNA sequence of clone 63235064

[4294] SEQ ID NO:4254 is the determined cDNA sequence of clone 63235067

[4295] SEQ ID NO:4255 is the determined cDNA sequence of clone 63235068

[4296] SEQ ID NO:4256 is the determined cDNA sequence of clone 63235069

[4297] SEQ ID NO:4257 is the determined cDNA sequence of clone 63235070

[4298] SEQ ID NO:4258 is the determined cDNA sequence of clone 63235071

[4299] SEQ ID NO:4259 is the determined cDNA sequence of clone 63235072

[4300] SEQ ID NO:4260 is the determined cDNA sequence of clone 63235073

[4301] SEQ ID NO:4261 is the determined cDNA sequence of clone 63235074

[4302] SEQ ID NO:4262 is the determined cDNA sequence of clone 63235075

[4303] SEQ ID NO:4263 is the determined cDNA sequence of clone 63235077

[4304] SEQ ID NO:4264 is the determined cDNA sequence of clone 63235078

[4305] SEQ ID NO:4265 is the determined cDNA sequence of clone 63235079

[4306] SEQ ID NO:4266 is the determined cDNA sequence of clone 63235080

[4307] SEQ ID NO:4267 is the determined cDNA sequence of clone 63235081

[4308] SEQ ID NO:4268 is the determined cDNA sequence of clone 63235082

[4309] SEQ ID NO:4269 is the determined cDNA sequence of clone 63235084

[4310] SEQ ID NO:4270 is the determined cDNA sequence of clone 63235085

[4311] SEQ ID NO:4271 is the determined cDNA sequence of clone 63235086

[4312] SEQ ID NO:4272 is the determined cDNA sequence of clone 63235087

[4313] SEQ ID NO:4273 is the determined cDNA sequence of clone 63792101

[4314] SEQ ID NO:4274 is the determined cDNA sequence of clone 63792102

[4315] SEQ ID NO:4275 is the determined cDNA sequence of clone 63792103

[4316] SEQ ID NO:4276 is the determined cDNA sequence of clone 63792104

[4317] SEQ ID NO:4277 is the determined cDNA sequence of clone 63792105

[4318] SEQ ID NO:4278 is the determined cDNA sequence of clone 63792106

[4319] SEQ ID NO:4279 is the determined cDNA sequence of clone 63792107

[4320] SEQ ID NO:4280 is the determined cDNA sequence of clone 63792108

[4321] SEQ ID NO:4281 is the determined cDNA sequence of clone 63792109

[4322] SEQ ID NO:4282 is the determined cDNA sequence of clone 63792110

[4323] SEQ ID NO:4283 is the determined cDNA sequence of clone 63792114

[4324] SEQ ID NO:4284 is the determined cDNA sequence of clone 63792115

[4325] SEQ ID NO:4285 is the determined cDNA sequence of clone 63792116

[4326] SEQ ID NO:4286 is the determined cDNA sequence of clone 63792117

[4327] SEQ ID NO:4287 is the determined cDNA sequence of clone 63792118

[4328] SEQ ID NO:4288 is the determined cDNA sequence of clone 63792119

[4329] SEQ ID NO:4289 is the determined cDNA sequence of clone 63792120

[4330] SEQ ID NO:4290 is the determined cDNA sequence of clone 63792121

[4331] SEQ ID NO:4291 is the determined cDNA sequence of clone 63792124

[4332] SEQ ID NO:4292 is the determined cDNA sequence of clone 63792125

[4333] SEQ ID NO:4293 is the determined cDNA sequence of clone 63792127

[4334] SEQ ID NO:4294 is the determined cDNA sequence of clone 63792128

[4335] SEQ ID NO:4295 is the determined cDNA sequence of clone 63792129

[4336] SEQ ID NO:4296 is the determined cDNA sequence of clone 63792130

[4337] SEQ ID NO:4297 is the determined cDNA sequence of clone 63792131

[4338] SEQ ID NO:4298 is the determined cDNA sequence of clone 63792132

[4339] SEQ ID NO:4299 is the determined cDNA sequence of clone 63792136

[4340] SEQ ID NO:4300 is the determined cDNA sequence of clone 63792137

[4341] SEQ ID NO:4301 is the determined cDNA sequence of clone 63792138

[4342] SEQ ID NO:4302 is the determined cDNA sequence of clone 63792139

[4343] SEQ ID NO:4303 is the determined cDNA sequence of clone 63792140

[4344] SEQ ID NO:4304 is the determined cDNA sequence of clone 63792141

[4345] SEQ ID NO:4305 is the determined cDNA sequence of clone 63792144

[4346] SEQ ID NO:4306 is the determined cDNA sequence of clone 63792145

[4347] SEQ ID NO:4307 is the determined cDNA sequence of clone 63792146

[4348] SEQ ID NO:4308 Is the determined cDNA sequence of clone 63792149

[4349] SEQ ID NO:4309 is the determined cDNA sequence of clone 63792150

[4350] SEQ ID NO:4310 is the determined cDNA sequence of clone 63792151

[4351] SEQ ID NO:4311 is the determined cDNA sequence of clone 63792152

[4352] SEQ ID NO:4312 is the determined cDNA sequence of clone 63792153

[4353] SEQ ID NO:4313 is the determined cDNA sequence of clone 63792156

[4354] SEQ ID NO:4314 is the determined cDNA sequence of clone 63792157

[4355] SEQ ID NO:4315 is the determined cDNA sequence of clone 63792159

[4356] SEQ ID NO:4316 is the determined cDNA sequence of clone 63792160

[4357] SEQ ID NO:4317 is the determined cDNA sequence of clone 63792161

[4358] SEQ ID NO:4318 is the determined cDNA sequence of clone 63792162

[4359] SEQ ID NO:4319 is the determined cDNA sequence of clone 63792163

[4360] SEQ ID NO:4320 is the determined cDNA sequence of clone 63792165

[4361] SEQ ID NO:4321 is the determined cDNA sequence of clone 63792166

[4362] SEQ ID NO:4322 is the determined cDNA sequence of clone 63792167

[4363] SEQ ID NO:4323 is the determined cDNA sequence of clone 63792168

[4364] SEQ ID NO:4324 is the determined cDNA sequence of clone 63792169

[4365] SEQ ID NO:4325 is the determined cDNA sequence of clone 63792170

[4366] SEQ ID NO:4326 is the determined cDNA sequence of clone 63792171

[4367] SEQ ID NO:4327 is the determined cDNA sequence of clone 63792172

[4368] SEQ ID NO:4328 is the determined cDNA sequence of clone 63792173

[4369] SEQ ID NO:4329 is the determined cDNA sequence of clone 63792174

[4370] SEQ ID NO:4330 is the determined cDNA sequence of clone 63792175

[4371] SEQ ID NO:4331 is the determined cDNA sequence of clone 63792176

[4372] SEQ ID NO:4332 is the determined cDNA sequence of clone 63792177

[4373] SEQ ID NO:4333 is the determined cDNA sequence of clone 63792178

[4374] SEQ ID NO:4334 is the determined cDNA sequence of clone 63792179

[4375] SEQ ID NO:4335 is the determined cDNA sequence of clone 63792180

[4376] SEQ ID NO:4336 is the determined cDNA sequence of clone 63792181

[4377] SEQ ID NO:4337 is the determined cDNA sequence of clone 63792183

[4378] SEQ ID NO:4338 is the determined cDNA sequence of clone 63792184

[4379] SEQ ID NO:4339 is the determined cDNA sequence of clone 63792185

[4380] SEQ ID NO:4340 is the determined cDNA sequence of clone 63792186

[4381] SEQ ID NO:4341 is the determined cDNA sequence of clone 63792187

[4382] SEQ ID NO:4342 is the determined cDNA sequence of clone 63792188

[4383] SEQ ID NO:4343 is the determined cDNA sequence of clone 63792189

[4384] SEQ ID NO:4344 is the determined cDNA sequence of clone 63792190

[4385] SEQ ID NO:4345 is the determined cDNA sequence of clone 63792192

[4386] SEQ ID NO:4346 is the determined cDNA sequence of clone p0150r10c11

[4387] SEQ ID NO:4347 is the determined cDNA sequence of clone p0150r07c17

[4388] SEQ ID NO:4348 is the determined cDNA sequence of clone p0150r09c15

[4389] SEQ ID NO:4349 is the determined cDNA sequence of clone p0150r07c14

[4390] SEQ ID NO:4350 is the determined cDNA sequence of clone p0150r11c05

[4391] SEQ ID NO:4351 is the determined cDNA sequence of clone p0160r06c18

[4392] SEQ ID NO:4352 is the determined cDNA sequence of clone p0160r02c21

[4393] SEQ ID NO:4353 is the determined cDNA sequence of clone p0160r13c02

[4394] SEQ ID NO:4354 is the determined cDNA sequence of clone p0150r13c04

[4395] SEQ ID NO:4355 is the determined cDNA sequence of clone p0150r02c15

[4396] SEQ ID NO:4356 is the determined cDNA sequence of clone p0150r06c12

[4397] SEQ ID NO:4357 is the determined cDNA sequence of clone p0151r06c12

[4398] SEQ ID NO:4358 is the determined cDNA sequence of clone p0150r14c04

[4399] SEQ ID NO:4359 is the determined cDNA sequence of clone p0150r02c06

[4400] SEQ ID NO:4360 is the determined cDNA sequence of clone p0150r04c19

[4401] SEQ ID NO:4361 is the determined cDNA sequence of clone p0150r03c18

[4402] SEQ ID NO:4362 is the determined cDNA sequence of clone p0151r13c03

[4403] SEQ ID NO:4363 is the determined cDNA sequence of clone p0150r01c08

[4404] SEQ ID NO:4364 is the determined cDNA sequence of clone p0150r11c07

[4405] SEQ ID NO:4365 is the determined cDNA sequence of clone p0150r02c11

[4406] SEQ ID NO:4366 is the determined cDNA sequence of clone p0150r01c17

[4407] SEQ ID NO:4367 is the determined cDNA sequence of clone p0150r05c16

[4408] SEQ ID NO:4368 is the determined cDNA sequence of clone p0150r06c04

[4409] SEQ ID NO:4369 is the determined cDNA sequence of clone p0150r15c17

[4410] SEQ ID NO:4370 is the determined cDNA sequence of clone p0150r15c11

[4411] SEQ ID NO:4371 is the determined cDNA sequence of clone p0150r09c13

[4412] SEQ ID NO:4372 is the determined cDNA sequence of clone p0150r13c03

[4413] SEQ ID NO:4373 is the determined cDNA sequence of clone p0150r09c10

[4414] SEQ ID NO:4374 is the determined cDNA sequence of clone p0161r13c17

[4415] SEQ ID NO:4375 is the determined cDNA sequence of clone p0159r16c21

[4416] SEQ ID NO:4376 is the determined cDNA sequence of clone p0150r02c02

[4417] SEQ ID NO:4377 is the determined cDNA sequence of clone p0151r09c19

[4418] SEQ ID NO:4378 is the determined cDNA sequence of clone p0151r02c06

[4419] SEQ ID NO:4379 is the determined cDNA sequence of clone p0150r16c06

[4420] SEQ ID NO:4380 is the determined cDNA sequence of clone p0150r09c12

[4421] SEQ ID NO:4381 is the determined cDNA sequence of clone p0150r07c06

[4422] SEQ ID NO:4382 is the determined cDNA sequence of clone p0150r06c19

[4423] SEQ ID NO:4383 is the determined cDNA sequence of clone p0150r04c05

[4424] SEQ ID NO:4384 is the determined cDNA sequence of clone p0150r03c21

[4425] SEQ ID NO:4385 is the determined cDNA sequence of clone p0150r02c18

[4426] SEQ ID NO:4386 is the determined cDNA sequence of clone p0150r15c07

[4427] SEQ ID NO:4387 is the determined cDNA sequence of clone p0150r10c15

[4428] SEQ ID NO:4388 is the determined cDNA sequence of clone p0150r07c05

[4429] SEQ ID NO:4389 is the determined cDNA sequence of clone p0150r06c08

[4430] SEQ ID NO:4390 is the determined cDNA sequence of clone p0150r01c24

[4431] SEQ ID NO:4391 is the determined cDNA sequence of clone p0150r07c15

[4432] SEQ ID NO:4392 is the determined cDNA sequence of clone p0150r02c23

[4433] SEQ ID NO:4393 is the determined cDNA sequence of clone p0151r09c08

[4434] SEQ ID NO:4394 is the determined cDNA sequence of clone p0150r16c09

[4435] SEQ ID NO:4395 is the determined cDNA sequence of clone p0150r14c11

[4436] SEQ ID NO:4396 is the determined cDNA sequence of clone p0151r05c12

[4437] SEQ ID NO:4397 is the determined cDNA sequence of clone p0150r12c23

[4438] SEQ ID NO:4398 is the determined cDNA sequence of clone p0150r16c02

[4439] SEQ ID NO:4399 is the determined cDNA sequence of clone p0155r10c08

[4440] SEQ ID NO:4400 is the determined cDNA sequence of clone p0150r02c05

[4441] SEQ ID NO:4401 is the determined cDNA sequence of clone p0150r09c04

[4442] SEQ ID NO:4402 is the determined cDNA sequence of clone p0150r03c22

[4443] SEQ ID NO:4403 is the determined cDNA sequence of clone p0150r15c10

[4444] SEQ ID NO:4404 is the determined cDNA sequence of clone p0150r13c20

[4445] SEQ ID NO:4405 is the determined cDNA sequence of clone p0150r08c18

[4446] SEQ ID NO:4406 is the determined cDNA sequence of clone p0150r09c22

[4447] SEQ ID NO:4407 is the determined cDNA sequence of clone p0157r08c09

[4448] SEQ ID NO:4408 is the determined cDNA sequence of clone p0163r04c09

[4449] SEQ ID NO:4409 is the determined cDNA sequence of clone p0155r01c04

[4450] SEQ ID NO:4410 is the determined cDNA sequence of clone p0152r16c22

[4451] SEQ ID NO:4411 is the determined cDNA sequence of clone p0152r16c12

[4452] SEQ ID NO:4412 is the determined cDNA sequence of clone p0150r01c16

[4453] SEQ ID NO:4413 is the determined cDNA sequence of clone p0150r05c23

[4454] SEQ ID NO:4414 is the determined cDNA sequence of clone p0150r11c09

[4455] SEQ ID NO:4415 is the determined cDNA sequence of clone p0150r13c22

[4456] SEQ ID NO:4416 is the determined cDNA sequence of clone p0150r11c17

[4457] SEQ ID NO:4417 is the determined cDNA sequence of clone p0159r16c01

[4458] SEQ ID NO:4418 is the determined cDNA sequence of clone p0156r16c21

[4459] SEQ ID NO:4419 is the determined cDNA sequence of clone p0150r06c15

[4460] SEQ ID NO:4420 is the determined cDNA sequence of clone p0151 r05c04

[4461] SEQ ID NO:4421 is the determined cDNA sequence of clone p0150r05c21

[4462] SEQ ID NO:4422 is the determined cDNA sequence of clone p0150r11c22

[4463] SEQ ID NO:4423 is the determined cDNA sequence of clone p0150r01c14

[4464] SEQ ID NO:4424 is the determined cDNA sequence of clone p0150r15c08

[4465] SEQ ID NO:4425 is the determined cDNA sequence of clone p0150r11c02

[4466] SEQ ID NO:4426 is the determined cDNA sequence of clone p0157r07c21

[4467] SEQ ID NO:4427 is the determined cDNA sequence of clone p0150r16c17

[4468] SEQ ID NO:4428 is the determined cDNA sequence of clone p0155r03c08

[4469] SEQ ID NO:4429 is the determined cDNA sequence of clone p0150r07c10

[4470] SEQ ID NO:4430 is the determined cDNA sequence of clone p0150r16c13

[4471] SEQ ID NO:4431 is the determined cDNA sequence of clone p0150r06c10

[4472] SEQ ID NO:4432 is the determined cDNA sequence of clone p0150r02c16

[4473] SEQ ID NO:4433 is the determined cDNA sequence of clone p0150r09c06

[4474] SEQ ID NO:4434 is the determined cDNA sequence of clone p0150r11c16

[4475] SEQ ID NO:4435 is the determined cDNA sequence of clone p0150r01c13

[4476] SEQ ID NO:4436 is the determined cDNA sequence of clone p0150r08c10

[4477] SEQ ID NO:4437 is the determined cDNA sequence of clone p0150r05c18

[4478] SEQ ID NO:4438 is the determined cDNA sequence of clone p0159r14c18

[4479] SEQ ID NO:4439 is the determined cDNA sequence of clone p0150r16c22

[4480] SEQ ID NO:4440 is the determined cDNA sequence of clone p0152r10c20

[4481] SEQ ID NO:4441 is the determined cDNA sequence of clone p0150r13c23

[4482] SEQ ID NO:4442 is the determined cDNA sequence of clone p0150r12c10

[4483] SEQ ID NO:4443 is the determined cDNA sequence of clone p0150r09c18

[4484] SEQ ID NO:4444 is the determined cDNA sequence of clone p0158r09c04

[4485] SEQ ID NO:4445 is the determined cDNA sequence of clone p0150r08c09

[4486] SEQ ID NO:4446 is the determined cDNA sequence of clone p0150r11c11

[4487] SEQ ID NO:4447 is the determined cDNA sequence of clone p0150r15c01

[4488] SEQ ID NO:4448 is the determined cDNA sequence of clone p0157r07c01

[4489] SEQ ID NO:4449 is the determined cDNA sequence of clone p0150r09c21

[4490] SEQ ID NO:4450 is the determined cDNA sequence of clone p0150r12c02

[4491] SEQ ID NO:4451 is the determined cDNA sequence of clone p0150r03c17

[4492] SEQ ID NO:4452 is the determined cDNA sequence of clone p0157r07c20

[4493] SEQ ID NO:4453 is the determined cDNA sequence of clone p0150r05c20

[4494] SEQ ID NO:4454 is the determined cDNA sequence of clone p0150r05c04

[4495] SEQ ID NO:4455 is the determined cDNA sequence of clone p0150r07c12

[4496] SEQ ID NO:4456 is the determined cDNA sequence of clone p0150r05c02

[4497] SEQ ID NO:4457 is the determined cDNA sequence of clone p0152r13c24

[4498] SEQ ID NO:4458 is the determined cDNA sequence of clone p0150r03c11

[4499] SEQ ID NO:4459 is the determined cDNA sequence of clone p0162r13c11

[4500] SEQ ID NO:4460 is the determined cDNA sequence of clone p0151r13c15

[4501] SEQ ID NO:4461 is the determined cDNA sequence of clone p0150r03c01

[4502] SEQ ID NO:4462 is the determined cDNA sequence of clone p0151r08c17

[4503] SEQ ID NO:4463 is the determined cDNA sequence of clone p0150r01c02

[4504] SEQ ID NO:4464 is the determined cDNA sequence of clone p0150r04c06

[4505] SEQ ID NO:4465 is the determined cDNA sequence of clone p0150r09c19

[4506] SEQ ID NO:4466 is the determined cDNA sequence of clone p0153r06c10

[4507] SEQ ID NO:4467 is the determined cDNA sequence of clone p0150r02c20

[4508] SEQ ID NO:4468 is the determined cDNA sequence of clone p0155r09c08

[4509] SEQ ID NO:4469 is the determined cDNA sequence of clone p0152r16c01

[4510] SEQ ID NO:4470 is the determined cDNA sequence of clone p0150r13c02

[4511] SEQ ID NO:4471 is the determined cDNA sequence of clone p0150r12c22

[4512] SEQ ID NO:4472 is the determined cDNA sequence of clone p0150r11c23

[4513] SEQ ID NO:4473 is the determined cDNA sequence of clone p0155r10c24

[4514] SEQ ID NO:4474 is the determined cDNA sequence of clone p0157r06c03

[4515] SEQ ID NO:4475 is the determined cDNA sequence of clone p0150r05c24

[4516] SEQ ID NO:4476 is the determined cDNA sequence of clone p0150r11c04

[4517] SEQ ID NO:4477 is the determined cDNA sequence of clone p0156r16c18

[4518] SEQ ID NO:4478 is the determined cDNA sequence of clone p0155r10c19

[4519] SEQ ID NO:4479 is the determined cDNA sequence of clone p0150r14c23

[4520] SEQ ID NO:4480 is the determined cDNA sequence of clone p0150r10c19

[4521] SEQ ID NO:4481 is the determined cDNA sequence of clone p0150r11c19

[4522] SEQ ID NO:4482 is the determined cDNA sequence of clone p0150r15c21

[4523] SEQ ID NO:4483 is the determined cDNA sequence of clone p0150r11c21

[4524] SEQ ID NO:4484 is the determined cDNA sequence of clone p0157r05c22

[4525] SEQ ID NO:4485 is the determined cDNA sequence of clone p0157r05c21

[4526] SEQ ID NO:4486 is the determined cDNA sequence of clone p0157r06c05

[4527] SEQ ID NO:4487 is the determined cDNA sequence of clone p0157r06c05

[4528] SEQ ID NO:4488 is the determined cDNA sequence of clone p0150r15c22

[4529] SEQ ID NO:4489 is the determined cDNA sequence of clone p0159r03c13

[4530] SEQ ID NO:4490 is the determined cDNA sequence of clone p0160r04c18

[4531] SEQ ID NO:4491 is the determined cDNA sequence of clone p0150r06c23

[4532] SEQ ID NO:4492 is the determined cDNA sequence of clone p0150r02c15

[4533] SEQ ID NO:4493 is the determined cDNA sequence of clone p0150r13c24

[4534] SEQ ID NO:4494 is the determined cDNA sequence of clone p0150r15c03

[4535] SEQ ID NO:4495 is the determined cDNA sequence of clone p0150r05c19

[4536] SEQ ID NO:4496 is the determined cDNA sequence of clone p0150r07c01

[4537] SEQ ID NO:4497 is the determined cDNA sequence of clone p0150r06c16

[4538] SEQ ID NO:4498 is the determined cDNA sequence of clone p0150r02c07

[4539] SEQ ID NO:4499 is the determined cDNA sequence of clone p0152r15c23

[4540] SEQ ID NO:4500 is the determined cDNA sequence of clone p0150r11c01

[4541] SEQ ID NO:4501 is the determined cDNA sequence of clone p0150r03c14

[4542] SEQ ID NO:4502 is the determined cDNA sequence of clone p0150r02c12

[4543] SEQ ID NO:4503 is the determined cDNA sequence of clone p0150r04c17

[4544] SEQ ID NO:4504 is the determined cDNA sequence of clone p0150r01c04

[4545] SEQ ID NO:4505 is the determined cDNA sequence of clone p0150r02c22

[4546] SEQ ID NO:4506 is the determined cDNA sequence of clone p0150r09c01

[4547] SEQ ID NO:4507 is the determined cDNA sequence of clone p0150r08c17

[4548] SEQ ID NO:4508 is the determined cDNA sequence of clone p0150r09c17

[4549] SEQ ID NO:4509 is the determined cDNA sequence of clone p0150r09c20

[4550] SEQ ID NO:4510 is the determined cDNA sequence of clone p0150r08c06

[4551] SEQ ID NO:4511 is the determined cDNA sequence of clone p0150r13c19

[4552] SEQ ID NO:4512 is the determined cDNA sequence of clone p0150r12c09

[4553] SEQ ID NO:4513 is the determined cDNA sequence of clone p0150r11c03

[4554] SEQ ID NO:4514 is the determined cDNA sequence of clone p0150r12c08

[4555] SEQ ID NO:4515 is the determined cDNA sequence of clone p0150r05c22

[4556] SEQ ID NO:4516 is the determined cDNA sequence of clone p0150r09c11

[4557] SEQ ID NO:4517 is the determined cDNA sequence of clone p0150r15c23

[4558] SEQ ID NO:4518 is the determined cDNA sequence of clone p0157r05c17

[4559] SEQ ID NO:4519 is the determined cDNA sequence of clone p0157r07c13

[4560] SEQ ID NO:4520 is the determined cDNA sequence of clone p0157r07c14

[4561] SEQ ID NO:4521 is the determined cDNA sequence of clone p0157r07c15

[4562] SEQ ID NO:4522 is the determined cDNA sequence of clone p0151r01c08

[4563] SEQ ID NO:4523 is the determined cDNA sequence of clone p0155r07c16

[4564] SEQ ID NO:4524 is the determined cDNA sequence of clone p0152r06c10

[4565] SEQ ID NO:4525 is the determined cDNA sequence of clone p0150r04c18

[4566] SEQ ID NO:4526 is the determined cDNA sequence of clone p0150r02c03

[4567] SEQ ID NO:4527 is the determined cDNA sequence of clone p0150r06c24

[4568] SEQ ID NO:4528 is the determined cDNA sequence of clone p0150r11c14

[4569] SEQ ID NO:4529 is the determined cDNA sequence of clone p0157r05c18

[4570] SEQ ID NO:4530 is the determined cDNA sequence of clone p0157r06c17

[4571] SEQ ID NO:4531 is the determined cDNA sequence of clone p0157r07c18

[4572] SEQ ID NO:4532 is the determined cDNA sequence of clone p0157r06c08

[4573] SEQ ID NO:4533 is the determined cDNA sequence of clone p0157r07c23

[4574] SEQ ID NO:4534 is the determined cDNA sequence of clone p0150r01c20

[4575] SEQ ID NO:4535 is the determined cDNA sequence of clone p0150r14c15

[4576] SEQ ID NO:4536 is the determined cDNA sequence of clone p0150r15c06

[4577] SEQ ID NO:4537 is the determined cDNA sequence of clone p0151r12c17

[4578] SEQ ID NO:4538 is the determined cDNA sequence of clone p0155r12c15

[4579] SEQ ID NO:4539 is the determined cDNA sequence of clone p0157r07c09

[4580] SEQ ID NO:4540 is the determined cDNA sequence of clone p0157r08c05

[4581] SEQ ID NO:4541 is the determined cDNA sequence of clone p0157r08c17

[4582] SEQ ID NO:4542 is the determined cDNA sequence of clone p0160r03c01

[4583] SEQ ID NO:4543 is the determined cDNA sequence of clone p0161r16c06

[4584] SEQ ID NO:4544 is the determined cDNA sequence of clone p0162r02c05

[4585] SEQ ID NO:4545 is the determined cDNA sequence of clone p0157r06c24

[4586] SEQ ID NO:4546 is the determined cDNA sequence of clone p0157r07c06

[4587] SEQ ID NO:4547 is the determined full length cDNA sequence of Pn1467P

[4588] SEQ ID NO:4548 is the determined full length cDNA sequence of Pn1468P

[4589] SEQ ID NO:4549 is the determined full length cDNA sequence of Pn1472P

[4590] SEQ ID NO:4550 is the determined full length cDNA sequence of Pn1475P

[4591] SEQ ID NO:4551 is the full length protein sequence of Pn1467P

[4592] SEQ ID NO:4552 is the full length protein sequence of Pn1468P

[4593] SEQ ID NO:4553 is the full length protein sequence of Pn1472P

[4594] SEQ ID NO:4554 is the full length protein sequence of Pn1475P

[4595] SEQ ID NO:4555 is the full length cDNA sequence of Pn1509P.

[4596] SEQ ID NO:4556 is the full length cDNA sequence of Pn1510P-short, encoding a 243 amino acid ORF of Pn1510P as set forth in SEQ ID NO:4559.

[4597] SEQ ID NO:4557 is the full length cDNA sequence of Pn1510P-long, encoding a 278 amino acid ORF of Pn1510P as set forth in SEQ ID NO:4560.

[4598] SEQ ID NO:4558 is the full length protein sequence of Pn1509P, encoded by the cDNA set forth in SEQ ID NO:4555.

[4599] SEQ ID NO:4559 is the amino acid sequence of the Pn1510P-243 ORF encoded by the cDNA sequence set forth in SEQ ID NO:4556.

[4600] SEQ ID NO:4560 is the amino acid sequence of the Pn1510P-278 ORF encoded by the cDNA sequence set forth in SEQ ID NO:4557.

### DETAILED DESCRIPTION OF THE INVENTION

[4601] The present invention is directed generally to compositions and their use in the therapy and diagnosis of cancer, particularly pancreatic cancer. As described further below, illustrative compositions of the present invention include, but are not restricted to, polypeptides, particularly immunogenic polypeptides, polynucleotides encoding such polypeptides, antibodies and other binding agents, antigen presenting cells (APCs) and immune system cells (e.g., T cells).

[4602] The practice of the present invention will employ, unless indicated specifically to the contrary, conventional methods of virology, immunology, microbiology, molecular biology and recombinant DNA techniques within the skill of the art, many of which are described below for the purpose of illustration. Such techniques are explained fully in the literature. See, e.g., Sambrook, et al. Molecular Cloning: A Laboratory Manual (2nd Edition, 1989); Maniatis et al. Molecular Cloning: A Laboratory Manual (1982); DNA Cloning: A Practical Approach, vol. I & II (D. Glover, ed.); Oligonucleotide Synthesis (N. Gait, ed., 1984); Nucleic Acid Hybridization (B. Hames & S. Higgins, eds., 1985); Transcription and Translation (B. Hames & S. Higgins, eds., 1984); Animal Cell Culture (R. Freshney, ed., 1986); Perbal, A Practical Guide to Molecular Cloning (1984).

[4603] All publications, patents and patent applications cited herein, whether supra or infra, are hereby incorporated by reference in their entirety.

[4604] As used in this specification and the appended claims, the singular forms “a,” “an” and “the” include plural references unless the content clearly dictates otherwise.

[4605] Polypeptide Compositions

[4606] As used herein, the term “polypeptide” “is used in its conventional meaning, i.e., as a sequence of amino acids. The polypeptides are not limited to a specific length of the product; thus, peptides, oligopeptides, and proteins are included within the definition of polypeptide, and such terms may be used interchangeably herein unless specifically indicated otherwise. This term also does not refer to or exclude post-expression modifications of the polypeptide, for example, glycosylations, acetylations, phosphorylations and the like, as well as other modifications known in the art, both naturally occurring and non-naturally occurring. A polypeptide may be an entire protein, or a subsequence thereof. Particular polypeptides of interest in the context of this invention are amino acid subsequences comprising epitopes, i.e., antigenic determinants substantially responsible for the immunogenic properties of a polypeptide and being capable of evoking an immune response.

[4607] Particularly illustrative polypeptides of the present invention comprise those encoded by a polynucleotide sequence set forth in any one of SEQ ID NOs:1-66, 75-152, 174-177, 182, 184-452, and 454-4550, or a sequence that hybridizes under moderately stringent conditions, or, alternatively, under highly stringent conditions, to a polynucleotide sequence set forth in any one of SEQ ID NOs:1-66, 75-152, 174-177, 182, 184-452, and 454-4550. Certain other illustrative polypeptides of the invention comprise amino acid sequences as set forth in any one of SEQ ID NOs:67-74, 153-173, 178-181, 183, 453, 4551-4554 and 4558-4560.

[4608] The polypeptides of the present invention are sometimes herein referred to as pancreatic tumor proteins or pancreatic tumor polypeptides, as an indication that their identification has been based at least in part upon their increased levels of expression in pancreatic tumor samples. Thus, a “pancreatic tumor polypeptide” or “pancreatic tumor protein,” refers generally to a polypeptide sequence of the present invention, or a polynucleotide sequence encoding such a polypeptide, that is expressed in a substantial proportion of pancreatic tumor samples, for example preferably greater than about 20%, more preferably greater than about 30%, and most preferably greater than about 50% or more of pancreatic tumor samples tested, at a level that is at least two fold, and preferably at least five fold, greater than the level of expression in normal tissues, as determined using a representative assay provided herein. A pancreatic tumor polypeptide sequence of the invention, based upon its increased level of expression in tumor cells, has particular utility both as a diagnostic marker as well as a therapeutic target, as further described below.

[4609] In certain preferred embodiments, the polypeptides of the invention are immunogenic, i.e., they react detectably within an immunoassay (such as an ELISA or T-cell stimulation assay) with antisera and/or T-cells from a patient with pancreatic cancer. Screening for immunogenic activity can be performed using techniques well known to the skilled artisan. For example, such screens can be performed using methods such as those described in Harlow and Lane, Antibodies: A Laboratory Manual, Cold Spring Harbor Laboratory, 1988. In one illustrative example, a polypeptide may be immobilized on a solid support and contacted with patient sera to allow binding of antibodies within the sera to the immobilized polypeptide. Unbound sera may then be removed and bound antibodies detected using, for example, ¹²⁵I-labeled Protein A.

[4610] As would be recognized by the skilled artisan, immunogenic portions of the polypeptides disclosed herein are also encompassed by the present invention. An “immunogenic portion,” as used herein, is a fragment of an immunogenic polypeptide of the invention that itself is immunologically reactive (i.e., specifically binds) with the B-cells and/or T-cell surface antigen receptors that recognize the polypeptide. Immunogenic portions may generally be identified using well known techniques, such as those summarized in Paul, Fundamental Immunology, 3rd ed., 243-247 (Raven Press, 1993) and references cited therein. Such techniques include screening polypeptides for the ability to react with antigen-specific antibodies, antisera and/or T-cell lines or clones. As used herein, antisera and antibodies are “antigen-specific” if they specifically bind to an antigen (i.e., they react with the protein in an ELISA or other immunoassay, and do not react detectably with unrelated proteins). Such antisera and antibodies may be prepared as described herein, and using well-known techniques.

[4611] In one preferred embodiment, an immunogenic portion of a polypeptide of the present invention is a portion that reacts with antisera and/or T-cells at a level that is not substantially less than the reactivity of the full-length polypeptide (e.g., in an ELISA and/or T-cell reactivity assay). Preferably, the level of immunogenic activity of the immunogenic portion is at least about 50%, preferably at least about 70% and most preferably greater than about 90% of the immunogenicity for the full-length polypeptide. In some instances, preferred immunogenic portions will be identified that have a level of immunogenic activity greater than that of the corresponding full-length polypeptide, e.g., having greater than about 100% or 150% or more immunogenic activity.

[4612] In certain other embodiments, illustrative immunogenic portions may include peptides in which an N-terminal leader sequence and/or transmembrane domain have been deleted. Other illustrative immunogenic portions will contain a small N- and/or C-terminal deletion (e.g., 1-30 amino acids, preferably 5-15 amino acids), relative to the mature protein.

[4613] In another embodiment, a polypeptide composition of the invention may also comprise one or more polypeptides that are immunologically reactive with T cells and/or antibodies generated against a polypeptide of the invention, particularly a polypeptide having an amino acid sequence disclosed herein, or to an immunogenic fragment or variant thereof.

[4614] In another embodiment of the invention, polypeptides are provided that comprise one or more polypeptides that are capable of eliciting T cells and/or antibodies that are immunologically reactive with one or more polypeptides described herein, or one or more polypeptides encoded by contiguous nucleic acid sequences contained in the polynucleotide sequences disclosed herein, or immunogenic fragments or variants thereof, or to one or more nucleic acid sequences which hybridize to one or more of these sequences under conditions of moderate to high stringency.

[4615] The present invention, in another aspect, provides polypeptide fragments comprising at least about 5, 10, 15, 20, 25, 50, or 100 contiguous amino acids, or more, including all intermediate lengths, of a polypeptide compositions set forth herein, such as those set forth in SEQ ID NOs:67-74, 153-173, 178-181, 183, 453, 4551-4554 and 4558-4560, or those encoded by a polynucleotide sequence set forth in a sequence of SEQ ID NOs:1-66, 75-152, 174-177, 182, 184-452, and 454-4550.

[4616] In another aspect, the present invention provides variants of the polypeptide compositions described herein. Polypeptide variants generally encompassed by the present invention will typically exhibit at least about 70%, 75%, 80%, 85%, 90%, 91%, 92%, 93%, 94%, 95%, 96%, 97%, 98%, or 99% or more identity (determined as described below), along its length, to a polypeptide sequences set forth herein.

[4617] In one preferred embodiment, the polypeptide fragments and variants provided by the present invention are immunologically reactive with an antibody and/or T-cell that reacts with a full-length polypeptide specifically set forth herein.

[4618] In another preferred embodiment, the polypeptide fragments and variants provided by the present invention exhibit a level of immunogenic activity of at least about 50%, preferably at least about 70%, and most preferably at least about 90% or more of that exhibited by a full-length polypeptide sequence specifically set forth herein.

[4619] A polypeptide “variant,” as the term is used herein, is a polypeptide that typically differs from a polypeptide specifically disclosed herein in one or more substitutions, deletions, additions and/or insertions. Such variants may be naturally occurring or may be synthetically generated, for example, by modifying one or more of the above polypeptide sequences of the invention and evaluating their immunogenic activity as described herein and/or using any of a number of techniques well known in the art.

[4620] For example, certain illustrative variants of the polypeptides of the invention include those in which one or more portions, such as an N-terminal leader sequence or transmembrane domain, have been removed. Other illustrative variants include variants in which a small portion (e.g., 1-30 amino acids, preferably 5-15 amino acids) has been removed from the N- and/or C-terminal of the mature protein.

[4621] In many instances, a variant will contain conservative substitutions. A “conservative substitution” is one in which an amino acid is substituted for another amino acid that has similar properties, such that one skilled in the art of peptide chemistry would expect the secondary structure and hydropathic nature of the polypeptide to be substantially unchanged. As described above, modifications may be made in the structure of the polynucleotides and polypeptides of the present invention and still obtain a functional molecule that encodes a variant or derivative polypeptide with desirable characteristics, e.g., with immunogenic characteristics. When it is desired to alter the amino acid sequence of a polypeptide to create an equivalent, or even an improved, immunogenic variant or portion of a polypeptide of the invention, one skilled in the art will typically change one or more of the codons of the encoding DNA sequence according to Table 1.

[4622] For example, certain amino acids may be substituted for other amino acids in a protein structure without appreciable loss of interactive binding capacity with structures such as, for example, antigen-binding regions of antibodies or binding sites on substrate molecules. Since it is the interactive capacity and nature of a protein that defines that protein's biological functional activity, certain amino acid sequence substitutions can be made in a protein sequence, and, of course, its underlying DNA coding sequence, and nevertheless obtain a protein with like properties. It is thus contemplated that various changes may be made in the peptide sequences of the disclosed compositions, or corresponding DNA sequences which encode said peptides without appreciable loss of their biological utility or activity.

TABLE 1

| Amino Acids | | | Codons |
|---|---|---|---|
| Alanine | Ala | A | GCA CCC GCG GGU |
| Cysteine | Cys | C | UGC UGU |
| Aspartic acid | Asp | D | GAC GAU |
| Glutamic acid | Glu | E | GAA GAG |
| Phenylalanine | Phe | F | UUC UUU |
| Glycine | Gly | G | GGA GGC GGG GGU |
| Histidine | His | H | CAC CAU |
| Isoleucine | Ile | I | AUA AUC AUU |
| Lysine | Lys | K | AAA AAG |
| Leucine | Leu | L | UUA UUG CUA CUC CUG CUU |
| Methionine | Met | M | AUG |
| Asparagine | Asn | N | AAC AAU |
| Proline | Pro | P | CCA CCC CCG CCU |
| Glutamine | Gln | Q | CAA CAG |
| Arginine | Arg | R | AGA AGG CGA CGC CGG CGU |
| Serine | Ser | S | AGC AGU UGA UCC UCG UCU |
| Threonine | Thr | T | ACA ACC ACG ACU |
| Valine | Val | V | GUA GUC GUG GUU |
| Tryptophan | Trp | W | UGG |
| Tyrosine | Tyr | Y | UAC UAU |

[4623] In making such changes, the hydropathic index of amino acids may be considered. The importance of the hydropathic amino acid index in conferring interactive biologic function on a protein is generally understood in the art (Kyte and Doolittle, 1982, incorporated herein by reference). It is accepted that the relative hydropathic character of the amino acid contributes to the secondary structure of the resultant protein, which in turn defines the interaction of the protein with other molecules, for example, enzymes, substrates, receptors, DNA, antibodies, antigens, and the like. Each amino acid has been assigned a hydropathic index on the basis of its hydrophobicity and charge characteristics (Kyte and Doolittle, 1982). These values are: isoleucine (+4.5); valine (+4.2); leucine (+3.8); phenylalanine (+2.8); cysteine/cystine (+2.5); methionine (+1.9); alanine (+1.8); glycine (−0.4); threonine (−0.7); serine (−0.8); tryptophan (−0.9); tyrosine (−1.3); proline (−1.6); histidine (−3.2); glutamate (−3.5); glutamine (−3.5); aspartate (−3.5); asparagine (−3.5); lysine (−3.9); and arginine (−4.5).

[4624] It is known in the art that certain amino acids may be substituted by other amino acids having a similar hydropathic index or score and still result in a protein with similar biological activity, i.e. still obtain a biological functionally equivalent protein. In making such changes, the substitution of amino acids whose hydropathic indices are within is preferred, those within ±1 are particularly preferred, and those within ±0.5 are even more particularly preferred. It is also understood in the art that the substitution of like amino acids can be made effectively on the basis of hydrophilicity. U.S. Pat. No. 4,554,101 (specifically incorporated herein by reference in its entirety), states that the greatest local average hydrophilicity of a protein, as governed by the hydrophilicity of its adjacent amino acids, correlates with a biological property of the protein.

[4625] As detailed in U.S. Pat. No. 4,554,101, the following hydrophilicity values have been assigned to amino acid residues: arginine (+3.0); lysine (+3.0); aspartate (+3.0±1); glutamate (+3.0±1); serine (+0.3); asparagine (+0.2); glutamine (+0.2); glycine (0); threonine (−0.4); proline (−0.5±1); alanine (−0.5); histidine (−0.5); cysteine (−1.0); methionine (−1.3); valine (−1.5); leucine (−1.8); isoleucine (−1.8); tyrosine (−2.3); phenylalanine (−2.5); tryptophan (−3.4). It is understood that an amino acid can be substituted for another having a similar hydrophilicity value and still obtain a biologically equivalent, and in particular, an immunologically equivalent protein. In such changes, the substitution of amino acids whose hydrophilicity values are within ±2 is preferred, those within ±1 are particularly preferred, and those within ±0.5 are even more particularly preferred.

[4626] As outlined above, amino acid substitutions are generally therefore based on the relative similarity of the amino acid side-chain substituents, for example, their hydrophobicity, hydrophilicity, charge, size, and the like. Exemplary substitutions that take various of the foregoing characteristics into consideration are well known to those of skill in the art and include: arginine and lysine; glutamate and aspartate; serine and threonine; glutamine and asparagine; and valine, leucine and isoleucine.

[4627] In addition, any polynucleotide may be further modified to increase stability in vivo. Possible modifications include, but are not limited to, the addition of flanking sequences at the 5′ and/or 3′ ends; the use of phosphorothioate or 2′ O-methyl rather than phosphodiesterase linkages in the backbone; and/or the inclusion of nontraditional bases such as inosine, queosine and wybutosine, as well as acetyl- methyl-, thio- and other modified forms of adenine, cytidine, guanine, thymine and uridine.

[4628] Amino acid substitutions may further be made on the basis of similarity in polarity, charge, solubility, hydrophobicity, hydrophilicity and/or the amphipathic nature of the residues. For example, negatively charged amino acids include aspartic acid and glutamic acid; positively charged amino acids include lysine and arginine; and amino acids with uncharged polar head groups having similar hydrophilicity values include leucine, isoleucine and valine; glycine and alanine; asparagine and glutamine; and serine, threonine, phenylalanine and tyrosine. Other groups of amino acids that may represent conservative changes include: (1) ala, pro, gly, glu, asp, gln, asn, ser, thr; (2) cys, ser, tyr, thr; (3) val, ile, leu, met, ala, phe; (4) lys, arg, his; and (5) phe, tyr, trp, his. A variant may also, or alternatively, contain nonconservative changes. In a preferred embodiment, variant polypeptides differ from a native sequence by substitution, deletion or addition of five amino acids or fewer. Variants may also (or alternatively) be modified by, for example, the deletion or addition of amino acids that have minimal influence on the immunogenicity, secondary structure and hydropathic nature of the polypeptide.

[4629] As noted above, polypeptides may comprise a signal (or leader) sequence at the N-terminal end of the protein, which co-translationally or post-translationally directs transfer of the protein. The polypeptide may also be conjugated to a linker or other sequence for ease of synthesis, purification or identification of the polypeptide (e.g., poly-His), or to enhance binding of the polypeptide to a solid support. For example, a polypeptide may be conjugated to an immunoglobulin Fc region.

[4630] When comparing polypeptide sequences, two sequences are said to be “identical” if the sequence of amino acids in the two sequences is the same when aligned for maximum correspondence, as described below. Comparisons between two sequences are typically performed by comparing the sequences over a comparison window to identify and compare local regions of sequence similarity. A “comparison window” as used herein, refers to a segment of at least about 20 contiguous positions, usually 30 to about 75, 40 to about 50, in which a sequence may be compared to a reference sequence of the same number of contiguous positions after the two sequences are optimally aligned.

[4631] Optimal alignment of sequences for comparison may be conducted using the Megalign program in the Lasergene suite of bioinformatics software (DNASTAR, Inc., Madison, Wis.), using default parameters. This program embodies several alignment schemes described in the following references: Dayhoff, M. O. (1978) A model of evolutionary change in proteins—Matrices for detecting distant relationships. In Dayhoff, M. O. (ed.) Atlas of Protein Sequence and Structure, National Biomedical Research Foundation, Washington D.C. Vol. 5, Suppl. 3, pp. 345-358; Hein J. (1990) Unified Approach to Alignment and Phylogenes pp. 626-645 Methods in Enzymology vol. 183, Academic Press, Inc., San Diego, Calif.; Higgins, D. G. and Sharp, P. M. (1989) CABIOS 5:151-153; Myers, E. W. and Muller W. (1988) CABIOS 4:11-17; Robinson, E. D. (1971) Comb. Theor 11:105; Santou, N. Nes, M. (1987) Mol. Biol. Evol. 4:406-425; Sneath, P. H. A. and Sokal, R. R. (1973) Numerical Taxonomy—the Principles and Practice of Numerical Taxonomy, Freeman Press, San Francisco, Calif.; Wilbur, W. J. and Lipman, D. J. (1983) Proc. Natl. Acad., Sci. USA 80:726-730.

[4632] Alternatively, optimal alignment of sequences for comparison may be conducted by the local identity algorithm of Smith and Waterman (1981) Add. APL. Math 2:482, by the identity alignment algorithm of Needleman and Wunsch (1970). Mol. Biol. 48:443, by the search for similarity methods of Pearson and Lipman (1988) Proc. Natl. Acad. Sci. USA 85: 2444, by computerized implementations of these algorithms (GAP,

### BESTFIT, BLAST, FASTA, and TFASTA in the Wisconsin Genetics Software Package Genetics Computer Group (GCG), 575 Science Dr., Madison, Wis.), or by inspection.

[4633] One preferred example of algorithms that are suitable for determining percent sequence identity and sequence similarity are the BLAST and BLAST 2.0 algorithms, which are described in Altschul et al. (1977) Nucl. Acids Res. 25:3389-3402 and Altschul et al. (1990) J. Mol. Biol. 215:403-410, respectively. BLAST and BLAST 2.0 can be used, for example with the parameters described herein, to determine percent sequence identity for the polynucleotides and polypeptides of the invention. Software for performing BLAST analyses is publicly available through the National Center for Biotechnology Information. For amino acid sequences, a scoring matrix can be used to calculate the cumulative score. Extension of the word hits in each direction are halted when: the cumulative alignment score falls off by the quantity X from its maximum achieved value; the cumulative score goes to zero or below, due to the accumulation of one or more negative-scoring residue alignments; or the end of either sequence is reached. The BLAST algorithm parameters W, T and X determine the sensitivity and speed of the alignment.

[4634] In one preferred approach, the “percentage of sequence identity” is determined by comparing two optimally aligned sequences over a window of comparison of at least 20 positions, wherein the portion of the polypeptide sequence in the comparison window may comprise additions or deletions (i.e., gaps) of 20 percent or less, usually 5 to 15 percent, or 10 to 12 percent, as compared to the reference sequences (which does not comprise additions or deletions) for optimal alignment of the two sequences. The percentage is calculated by determining the number of positions at which the identical amino acid residue occurs in both sequences to yield the number of matched positions, dividing the number of matched positions by the total number of positions in the reference sequence (i.e., the window size) and multiplying the results by 100 to yield the percentage of sequence identity.

[4635] Within other illustrative embodiments, a polypeptide may be a xenogeneic polypeptide that comprises an polypeptide having substantial sequence identity, as described above, to the human polypeptide (also termed autologous antigen) which served as a reference polypeptide, but which xenogeneic polypeptide is derived from a different, non-human species. One skilled in the art will recognize that “self” antigens are often poor stimulators of CD8+ and CD4+ T-lymphocyte responses, and therefore efficient immunotherapeutic strategies directed against tumor polypeptides require the development of methods to overcome immune tolerance to particular self tumor polypeptides. For example, humans immunized with prostase protein from a xenogeneic (non human) origin are capable of mounting an immune response against the counterpart human protein, e.g. the human prostase tumor protein present on human tumor cells. Accordingly, the present invention provides methods for purifying the xenogeneic form of the tumor proteins set forth herein, such as the polypeptides set forth in SEQ ID NOs:67-74, 153-173, 178-181, 183, 453, 4551-4554 and 4558-4560, or those encoded by polynucleotide sequences set forth in SEQ ID NOs:1-66, 75-152, 174-177, 182, 184-452 and 454-4550.

[4636] Therefore, one aspect of the present invention provides xenogeneic variants of the polypeptide compositions described herein. Such xenogeneic variants generally encompassed by the present invention will typically exhibit at least about 70%, 75%, 80%, 85%, 90%, 91%, 92%, 93%, 94%, 95%, 96%, 97%, 98%, or 99% or more identity along their lengths, to a polypeptide sequences set forth herein.

[4637] More particularly, the invention is directed to mouse, rat, monkey, porcine and other non-human polypeptides which can be used as xenogeneic forms of human polypeptides set forth herein, to induce immune responses directed against tumor polypeptides of the invention.

[4638] Within other illustrative embodiments, a polypeptide may be a fusion polypeptide that comprises multiple polypeptides as described herein, or that comprises at least one polypeptide as described herein and an unrelated sequence, such as a known tumor protein. A fusion partner may, for example, assist in providing T helper epitopes (an immunological fusion partner), preferably T helper epitopes recognized by humans, or may assist in expressing the protein (an expression enhancer) at higher yields than the native recombinant protein. Certain preferred fusion partners are both immunological and expression enhancing fusion partners. Other fusion partners may be selected so as to increase the solubility of the polypeptide or to enable the polypeptide to be targeted to desired intracellular compartments. Still further fusion partners include affinity tags, which facilitate purification of the polypeptide.

[4639] Fusion polypeptides may generally be prepared using standard techniques, including chemical conjugation. Preferably, a fusion polypeptide is expressed as a recombinant polypeptide, allowing the production of increased levels, relative to a non-fused polypeptide, in an expression system. Briefly, DNA sequences encoding the polypeptide components may be assembled separately, and ligated into an appropriate expression vector. The 3′ end of the DNA sequence encoding one polypeptide component is ligated, with or without a peptide linker, to the 5′ end of a DNA sequence encoding the second polypeptide component so that the reading frames of the sequences are in phase. This permits translation into a single fusion polypeptide that retains the biological activity of both component polypeptides.

[4640] A peptide linker sequence may be employed to separate the first and second polypeptide components by a distance sufficient to ensure that each polypeptide folds into its secondary and tertiary structures. Such a peptide linker sequence is incorporated into the fusion polypeptide using standard techniques well known in the art. Suitable peptide linker sequences may be chosen based on the following factors: (1) their ability to adopt a flexible extended conformation; (2) their inability to adopt a secondary structure that could interact with functional epitopes on the first and second polypeptides; and (3) the lack of hydrophobic or charged residues that might react with the polypeptide functional epitopes. Preferred peptide linker sequences contain Gly, Asn and Ser residues. Other near neutral amino acids, such as Thr and Ala may also be used in the linker sequence. Amino acid sequences which may be usefully employed as linkers include those disclosed in Maratea et al., Gene 40:39-46, 1985; Murphy et al., Proc. Natl. Acad. Sci. USA 83:8258-8262, 1986; U.S. Pat. No. 4,935,233 and U.S. Pat. No. 4,751,180. The linker sequence may generally be from 1 to about 50 amino acids in length. Linker sequences are not required when the first and second polypeptides have non-essential N-terminal amino acid regions that can be used to separate the functional domains and prevent steric interference.

[4641] The ligated DNA sequences are operably linked to suitable transcriptional or translational regulatory elements. The regulatory elements responsible for expression of DNA are located only 5′ to the DNA sequence encoding the first polypeptides. Similarly, stop codons required to end translation and transcription termination signals are only present 3′ to the DNA sequence encoding the second polypeptide.

[4642] The fusion polypeptide can comprise a polypeptide as described herein together with an unrelated immunogenic protein, such as an immunogenic protein capable of eliciting a recall response. Examples of such proteins include tetanus, tuberculosis and hepatitis proteins (see, for example, Stoute et al. New Engl. J. Med., 336:86-91, 1997).

[4643] In one preferred embodiment, the immunological fusion partner is derived from a Mycobacterium sp., such as a Mycobacterium tuberculosis-derived Ra12 fragment. Ra12 compositions and methods for their use in enhancing the expression and/or immunogenicity of heterologous polynucleotide/polypeptide sequences is described in U.S. Patent Application No. 60/158,585, the disclosure of which is incorporated herein by reference in its entirety. Briefly, Ra12 refers to a polynucleotide region that is a subsequence of a Mycobacterium tuberculosis MTB32A nucleic acid. MTB32A is a serine protease of 32 KD molecular weight encoded by a gene in virulent and avirulent strains of M. tuberculosis. The nucleotide sequence and amino acid sequence of MTB32A have been described (for example, U.S. Patent Application No. 60/158,585; see also, Skeiky et al., Infection and Immun. (1999) 67:3998-4007, incorporated herein by reference). C-terminal fragments of the MTB32A coding sequence express at high levels and remain as a soluble polypeptides throughout the purification process. Moreover, Ra12 may enhance the immunogenicity of heterologous immunogenic polypeptides with which it is fused. One preferred Ra12 fusion polypeptide comprises a 14 KD C-terminal fragment corresponding to amino acid residues 192 to 323 of MTB32A. Other preferred Ra12 polynucleotides generally comprise at least about 15 consecutive nucleotides, at least about 30 nucleotides, at least about 60 nucleotides, at least about 100 nucleotides, at least about 200 nucleotides, or at least about 300 nucleotides that encode a portion of a Ra12 polypeptide. Ra12 polynucleotides may comprise a native sequence (i.e., an endogenous sequence that encodes a Ra12 polypeptide or a portion thereof) or may comprise a variant of such a sequence. Ra12 polynucleotide variants may contain one or more substitutions, additions, deletions and/or insertions such that the biological activity of the encoded fusion polypeptide is not substantially diminished, relative to a fusion polypeptide comprising a native Ra12 polypeptide. Variants preferably exhibit at least about 70% identity, more preferably at least about 80% identity and most preferably at least about 90% identity to a polynucleotide sequence that encodes a native Ra12 polypeptide or a portion thereof.

[4644] Within other preferred embodiments, an immunological fusion partner is derived from protein D, a surface protein of the gram-negative bacterium Haemophilus influenza B (WO 91/18926). Preferably, a protein D derivative comprises approximately the first third of the protein (e.g., the first N-terminal 100-110 amino acids), and a protein D derivative may be lipidated. Within certain preferred embodiments, the first 109 residues of a Lipoprotein D fusion partner is included on the N-terminus to provide the polypeptide with additional exogenous T-cell epitopes and to increase the expression level in E. coli (thus functioning as an expression enhancer). The lipid tail ensures optimal presentation of the antigen to antigen presenting cells. Other fusion partners include the non-structural protein from influenzae virus, NS 1 (hemaglutinin). Typically, the N-terminal 81 amino acids are used, although different fragments that include T-helper epitopes may be used.

[4645] In another embodiment, the immunological fusion partner is the protein known as LYTA, or a portion thereof (preferably a C-terminal portion). LYTA is derived from Streptococcus pneumoniae, which synthesizes an N-acetyl-L-alanine amidase known as amidase LYTA (encoded by the LytA gene; Gene 43:265-292, 1986). LYTA is an autolysin that specifically degrades certain bonds in the peptidoglycan backbone. The C-terminal domain of the LYTA protein is responsible for the affinity to the choline or to some choline analogues such as DEAE. This property has been exploited for the development of E. coli C-LYTA expressing plasmids useful for expression of fusion proteins. Purification of hybrid proteins containing the C-LYTA fragment at the amino terminus has been described (see Biotechnology 10:795-798, 1992). Within a preferred embodiment, a repeat portion of LYTA may be incorporated into a fusion polypeptide. A repeat portion is found in the C-terminal region starting at residue 178. A particularly preferred repeat portion incorporates residues 188-305.

[4646] Yet another illustrative embodiment involves fusion polypeptides, and the polynucleotides encoding them, wherein the fusion partner comprises a targeting signal capable of directing a polypeptide to the endosomal/lysosomal compartment, as described in U.S. Pat. No. 5,633,234. An immunogenic polypeptide of the invention, when fused with this targeting signal, will associate more efficiently with MHC class II molecules and thereby provide enhanced in vivo stimulation of CD4⁺ T-cells specific for the polypeptide.

[4647] Polypeptides of the invention are prepared using any of a variety of well known synthetic and/or recombinant techniques, the latter of which are further described below. Polypeptides, portions and other variants generally less than about 150 amino acids can be generated by synthetic means, using techniques well known to those of ordinary skill in the art. In one illustrative example, such polypeptides are synthesized using any of the commercially available solid-phase techniques, such as the Merrifield solid-phase synthesis method, where amino acids are sequentially added to a growing amino acid chain. See Merrifield, J. Am. Chem. Soc. 85:2149-2146, 1963. Equipment for automated synthesis of polypeptides is commercially available from suppliers such as Perkin Elmer/Applied BioSystems Division (Foster City, Calif.), and may be operated according to the manufacturer's instructions.

[4648] In general, polypeptide compositions (including fusion polypeptides) of the invention are isolated. An “isolated” polypeptide is one that is removed from its original environment. For example, a naturally-occurring protein or polypeptide is isolated if it is separated from some or all of the coexisting materials in the natural system. Preferably, such polypeptides are also purified, e.g., are at least about 90% pure, more preferably at least about 95% pure and most preferably at least about 99% pure.

[4649] Polynucleotide Compositions

[4650] The present invention, in other aspects, provides polynucleotide compositions. The terms “DNA” and “polynucleotide” are used essentially interchangeably herein to refer to a DNA molecule that has been isolated free of total genomic DNA of a particular species. “Isolated,” as used herein, means that a polynucleotide is substantially away from other coding sequences, and that the DNA molecule does not contain large portions of unrelated coding DNA, such as large chromosomal fragments or other functional genes or polypeptide coding regions. Of course, this refers to the DNA molecule as originally isolated, and does not exclude genes or coding regions later added to the segment by the hand of man.

[4651] As will be understood by those skilled in the art, the polynucleotide compositions of this invention can include genomic sequences, extra-genomic and plasmid-encoded sequences and smaller engineered gene segments that express, or may be adapted to express, proteins, polypeptides, peptides and the like. Such segments may be naturally isolated, or modified synthetically by the hand of man.

[4652] As will be also recognized by the skilled artisan, polynucleotides of the invention may be single-stranded (coding or antisense) or double-stranded, and may be DNA (genomic, cDNA or synthetic) or RNA molecules. RNA molecules may include HnRNA molecules, which contain introns and correspond to a DNA molecule in a one-to-one manner, and mRNA molecules, which do not contain introns. Additional coding or non-coding sequences may, but need not, be present within a polynucleotide of the present invention, and a polynucleotide may, but need not, be linked to other molecules and/or support materials.

[4653] Polynucleotides may comprise a native sequence (i.e., an endogenous sequence that encodes a polypeptide/protein of the invention or a portion thereof) or may comprise a sequence that encodes a variant or derivative, preferably and immunogenic variant or derivative, of such a sequence.

[4654] Therefore, according to another aspect of the present invention, polynucleotide compositions are provided that comprise some or all of a polynucleotide sequence set forth in any one of SEQ ID NOs:1-66, 75-152, 174-177, 182, 184-452, and 454-4550, complements of a polynucleotide sequence set forth in any one of SEQ ID NOs:1-66, 75-152, 174-177, 182, 184-452, and 454-4550, and degenerate variants of a polynucleotide sequence set forth in any one of SEQ ID NOs:1-66, 75-152, 174-177, 182, 184-452, and 454-4550. In certain preferred embodiments, the polynucleotide sequences set forth herein encode immunogenic polypeptides, as described above.

[4655] In other related embodiments, the present invention provides polynucleotide variants having substantial identity to the sequences disclosed herein in SEQ ID NOs:1-66, 75-152, 174-177, 182, 184-452, and 454-4550, for example those comprising at least 70% sequence identity, preferably at least 75%, 80%, 85%, 90%, 95%, 96%, 97%, 98%, or 99% or higher, sequence identity compared to a polynucleotide sequence of this invention using the methods described herein, (e.g., BLAST analysis using standard parameters, as described below). One skilled in this art will recognize that these values can be appropriately adjusted to determine corresponding identity of proteins encoded by two nucleotide sequences by taking into account codon degeneracy, amino acid similarity, reading frame positioning and the like.

[4656] Typically, polynucleotide variants will contain one or more substitutions, additions, deletions and/or insertions, preferably such that the immunogenicity of the polypeptide encoded by the variant polynucleotide is not substantially diminished relative to a polypeptide encoded by a polynucleotide sequence specifically set forth herein). The term “variants” should also be understood to encompasses homologous genes of xenogenic origin.

[4657] In additional embodiments, the present invention provides polynucleotide fragments comprising various lengths of contiguous stretches of sequence identical to or complementary to one or more of the sequences disclosed herein. For example, polynucleotides are provided by this invention that comprise at least about 10, 15, 20, 30, 40, 50, 75, 100, 150, 200, 300, 400, 500 or 1000 or more contiguous nucleotides of one or more of the sequences disclosed herein as well as all intermediate lengths there between. It will be readily understood that “intermediate lengths”, in this context, means any length between the quoted values, such as 16, 17, 18, 19, etc.; 21, 22, 23, etc.; 30, 31, 32, etc.; 50, 51, 52, 53, etc.; 100, 101, 102, 103, etc.; 150, 151, 152, 153, etc.; including all integers through 200-500; 500-1,000, and the like. A polynucleotide sequence as described here may be extended at one or both ends by additional nucleotides not found in the native sequence. This additional sequence may consist of 1, 2, 3, 4, 5, 6, 7, 8, 9, 10, 11, 12, 13, 14, 15, 16, 17, 18, 19, or 20 nucleotides at either end of the disclosed sequence or at both ends of the disclosed sequence.

[4658] In another embodiment of the invention, polynucleotide compositions are provided that are capable of hybridizing under moderate to high stringency conditions to a polynucleotide sequence provided herein, or a fragment thereof, or a complementary sequence thereof. Hybridization techniques are well known in the art of molecular biology. For purposes of illustration, suitable moderately stringent conditions for testing the hybridization of a polynucleotide of this invention with other polynucleotides include prewashing in a solution of 5× SSC, 0.5% SDS, 1.0 mM EDTA (pH 8.0); hybridizing at 50° C.-60° C., 5× SSC, overnight; followed by washing twice at 65° C. for 20 minutes with each of 2×, 0.5× and 0.2× SSC containing 0.1% SDS. One skilled in the art will understand that the stringency of hybridization can be readily manipulated, such as by altering the salt content of the hybridization solution and/or the temperature at which the hybridization is performed. For example, in another embodiment, suitable highly stringent hybridization conditions include those described above, with the exception that the temperature of hybridization is increased, e.g., to 60-65° C. or 65-70° C.

[4659] In certain preferred embodiments, the polynucleotides described above, e.g., polynucleotide variants, fragments and hybridizing sequences, encode polypeptides that are immunologically cross-reactive with a polypeptide sequence specifically set forth herein. In other preferred embodiments, such polynucleotides encode polypeptides that have a level of immunogenic activity of at least about 50%, preferably at least about 70%, and more preferably at least about 90% of that for a polypeptide sequence specifically set forth herein.

[4660] The polynucleotides of the present invention, or fragments thereof, regardless of the length of the coding sequence itself, may be combined with other DNA sequences, such as promoters, polyadenylation signals, additional restriction enzyme sites, multiple cloning sites, other coding segments, and the like, such that their overall length may vary considerably. It is therefore contemplated that a nucleic acid fragment of almost any length may be employed, with the total length preferably being limited by the ease of preparation and use in the intended recombinant DNA protocol. For example, illustrative polynucleotide segments with total lengths of about 10,000, about 5000, about 3000, about 2,000, about 1,000, about 500, about 200, about 100, about 50 base pairs in length, and the like, (including all intermediate lengths) are contemplated to be useful in many implementations of this invention.

[4661] When comparing polynucleotide sequences, two sequences are said to be “identical” if the sequence of nucleotides in the two sequences is the same when aligned for maximum correspondence, as described below. Comparisons between two sequences are typically performed by comparing the sequences over a comparison window to identify and compare local regions of sequence similarity. A “comparison window” as used herein, refers to a segment of at least about 20 contiguous positions, usually 30 to about 75, 40 to about 50, in which a sequence may be compared to a reference sequence of the same number of contiguous positions after the two sequences are optimally aligned.

[4662] Optimal alignment of sequences for comparison may be conducted using the Megalign program in the Lasergene suite of bioinformatics software (DNASTAR, Inc., Madison, Wis.), using default parameters. This program embodies several alignment schemes described in the following references: Dayhoff, M. O. (1978) A model of evolutionary change in proteins—Matrices for detecting distant relationships. In Dayhoff, M. O. (ed.) Atlas of Protein Sequence and Structure, National Biomedical Research Foundation, Washington D.C. Vol. 5, Suppl. 3, pp. 345-358; Hein J. (1990) Unified Approach to Alignment and Phylogenes pp. 626-645 Methods in Enzymology vol. 183, Academic Press, Inc., San Diego, Calif.; Higgins, D. G. and Sharp, P. M. (1989) CABIOS 5:151-153; Myers, E. W. and Muller W. (1988) CABIOS 4:11-17; Robinson, E. D. (1971) Comb. Theor 11:105; Santou, N. Nes, M. (1987) Mol. Biol. Evol. 4:406-425; Sneath, P. H. A. and Sokal, R. R. (1973) Numerical Taxonomy—the Principles and Practice of Numerical Taxonomy, Freeman Press, San Francisco, Calif.; Wilbur, W. J. and Lipman, D. J. (1983) Proc. Natl. Acad., Sci. USA 80:726-730.

[4663] Alternatively, optimal alignment of sequences for comparison may be conducted by the local identity algorithm of Smith and Waterman (1981) Add. APL. Math 2:482, by the identity alignment algorithm of Needleman and Wunsch (1970) J. Mol. Biol. 48:443, by the search for similarity methods of Pearson and Lipman (1988) Proc. Natl. Acad. Sci. USA 85: 2444, by computerized implementations of these algorithms (GAP, BESTFIT, BLAST, FASTA, and TFASTA in the Wisconsin Genetics Software Package Genetics Computer Group (GCG), 575 Science Dr., Madison, Wis.), or by inspection.

[4664] One preferred example of algorithms that are suitable for determining percent sequence identity and sequence similarity are the BLAST and BLAST 2.0 algorithms, which are described in Altschul et al. (1977) Nucl. Acids Res. 25:3389-3402 and Altschul et al. (1990) J. Mol. Biol. 215:403-410, respectively. BLAST and BLAST 2.0 can be used, for example with the parameters described herein, to determine percent sequence identity for the polynucleotides of the invention. Software for performing BLAST analyses is publicly available through the National Center for Biotechnology Information. In one illustrative example, cumulative scores can be calculated using, for nucleotide sequences, the parameters M (reward score for a pair of matching residues; always >0) and N (penalty score for mismatching residues; always <0). Extension of the word hits in each direction are halted when: the cumulative alignment score falls off by the quantity X from its maximum achieved value; the cumulative score goes to zero or below, due to the accumulation of one or more negative-scoring residue alignments; or the end of either sequence is reached. The BLAST algorithm parameters W, T and X determine the sensitivity and speed of the alignment. The BLASTN program (for nucleotide sequences) uses as defaults a wordlength (W) of 11, and expectation (E) of 10, and the BLOSUM62 scoring matrix (see Henikoff and Henikoff (1989) Proc. Natl. Acad. Sci. USA 89:10915) alignments, (B) of 50, expectation (E) of 10, M=5, N=−4 and a comparison of both strands.

[4665] Preferably, the “percentage of sequence identity” is determined by comparing two optimally aligned sequences over a window of comparison of at least 20 positions, wherein the portion of the polynucleotide sequence in the comparison window may comprise additions or deletions (i.e., gaps) of 20 percent or less, usually 5 to 15 percent, or 10 to 12 percent, as compared to the reference sequences (which does not comprise additions or deletions) for optimal alignment of the two sequences. The percentage is calculated by determining the number of positions at which the identical nucleic acid bases occurs in both sequences to yield the number of matched positions, dividing the number of matched positions by the total number of positions in the reference sequence (i.e., the window size) and multiplying the results by 100 to yield the percentage of sequence identity.

[4666] It will be appreciated by those of ordinary skill in the art that, as a result of the degeneracy of the genetic code, there are many nucleotide sequences that encode a polypeptide as described herein. Some of these polynucleotides bear minimal homology to the nucleotide sequence of any native gene. Nonetheless, polynucleotides that vary due to differences in codon usage are specifically contemplated by the present invention. Further, alleles of the genes comprising the polynucleotide sequences provided herein are within the scope of the present invention. Alleles are endogenous genes that are altered as a result of one or more mutations, such as deletions, additions and/or substitutions of nucleotides. The resulting mRNA and protein may, but need not, have an altered structure or function. Alleles may be identified using standard techniques (such as hybridization, amplification and/or database sequence comparison).

[4667] Therefore, in another embodiment of the invention, a mutagenesis approach, such as site-specific mutagenesis, is employed for the preparation of immunogenic variants and/or derivatives of the polypeptides described herein. By this approach, specific modifications in a polypeptide sequence can be made through mutagenesis of the underlying polynucleotides that encode them. These techniques provides a straightforward approach to prepare and test sequence variants, for example, incorporating one or more of the foregoing considerations, by introducing one or more nucleotide sequence changes into the polynucleotide.

[4668] Site-specific mutagenesis allows the production of mutants through the use of specific oligonucleotide sequences which encode the DNA sequence of the desired mutation, as well as a sufficient number of adjacent nucleotides, to provide a primer sequence of sufficient size and sequence complexity to form a stable duplex on both sides of the deletion junction being traversed. Mutations may be employed in a selected polynucleotide sequence to improve, alter, decrease, modify, or otherwise change the properties of the polynucleotide itself, and/or alter the properties, activity, composition, stability, or primary sequence of the encoded polypeptide.

[4669] In certain embodiments of the present invention, the inventors contemplate the mutagenesis of the disclosed polynucleotide sequences to alter one or more properties of the encoded polypeptide, such as the immunogenicity of a polypeptide vaccine. The techniques of site-specific mutagenesis are well-known in the art, and are widely used to create variants of both polypeptides and polynucleotides. For example, site-specific mutagenesis is often used to alter a specific portion of a DNA molecule. In such embodiments, a primer comprising typically about 14 to about 25 nucleotides or so in length is employed, with about 5 to about 10 residues on both sides of the junction of the sequence being altered.

[4670] As will be appreciated by those of skill in the art, site-specific mutagenesis techniques have often employed a phage vector that exists in both a single stranded and double stranded form. Typical vectors useful in site-directed mutagenesis include vectors such as the M13 phage. These phage are readily commercially-available and their use is generally well-known to those skilled in the art. Double-stranded plasmids are also routinely employed in site directed mutagenesis that eliminates the step of transferring the gene of interest from a plasmid to a phage.

[4671] In general, site-directed mutagenesis in accordance herewith is performed by first obtaining a single-stranded vector or melting apart of two strands of a double-stranded vector that includes within its sequence a DNA sequence that encodes the desired peptide. An oligonucleotide primer bearing the desired mutated sequence is prepared, generally synthetically. This primer is then annealed with the single-stranded vector, and subjected to DNA polymerizing enzymes such as E. coli polymerase I Klenow fragment, in order to complete the synthesis of the mutation-bearing strand. Thus, a heteroduplex is formed wherein one strand encodes the original non-mutated sequence and the second strand bears the desired mutation. This heteroduplex vector is then used to transform appropriate cells, such as E. coli cells, and clones are selected which include recombinant vectors bearing the mutated sequence arrangement.

[4672] The preparation of sequence variants of the selected peptide-encoding DNA segments using site-directed mutagenesis provides a means of producing potentially useful species and is not meant to be limiting as there are other ways in which sequence variants of peptides and the DNA sequences encoding them may be obtained. For example, recombinant vectors encoding the desired peptide sequence may be treated with mutagenic agents, such as hydroxylamine, to obtain sequence variants. Specific details regarding these methods and protocols are found in the teachings of Maloy et al., 1994; Segal, 1976; Prokop and Bajpai, 1991; Kuby, 1994; and Maniatis et al., 1982, each incorporated herein by reference, for that purpose.

[4673] As used herein, the term “oligonucleotide directed mutagenesis procedure” refers to template-dependent processes and vector-mediated propagation which result in an increase in the concentration of a specific nucleic acid molecule relative to its initial concentration, or in an increase in the concentration of a detectable signal, such as amplification. As used herein, the term “oligonucleotide directed mutagenesis procedure” is intended to refer to a process that involves the template-dependent extension of a primer molecule. The term template dependent process refers to nucleic acid synthesis of an RNA or a DNA molecule wherein the sequence of the newly synthesized strand of nucleic acid is dictated by the well-known rules of complementary base pairing (see, for example, Watson, 1987). Typically, vector mediated methodologies involve the introduction of the nucleic acid fragment into a DNA or RNA vector, the clonal amplification of the vector, and the recovery of the amplified nucleic acid fragment. Examples of such methodologies are provided by U.S. Pat. No. 4,237,224, specifically incorporated herein by reference in its entirety.

[4674] In another approach for the production of polypeptide variants of the present invention, recursive sequence recombination, as described in U.S. Pat. No. 5,837,458, may be employed. In this approach, iterative cycles of recombination and screening or selection are performed to “evolve” individual polynucleotide variants of the invention having, for example, enhanced immunogenic activity.

[4675] In other embodiments of the present invention, the polynucleotide sequences provided herein can be advantageously used as probes or primers for nucleic acid hybridization. As such, it is contemplated that nucleic acid segments that comprise a sequence region of at least about 15 nucleotide long contiguous sequence that has the same sequence as, or is complementary to, a 15 nucleotide long contiguous sequence disclosed herein will find particular utility. Longer contiguous identical or complementary sequences, e.g., those of about 20, 30, 40, 50, 100, 200, 500, 1000 (including all intermediate lengths) and even up to full length sequences will also be of use in certain embodiments.

[4676] The ability of such nucleic acid probes to specifically hybridize to a sequence of interest will enable them to be of use in detecting the presence of complementary sequences in a given sample. However, other uses are also envisioned, such as the use of the sequence information for the preparation of mutant species primers, or primers for use in preparing other genetic constructions.

[4677] Polynucleotide molecules having sequence regions consisting of contiguous nucleotide stretches of 10-14, 15-20, 30, 50, or even of 100-200 nucleotides or so (including intermediate lengths as well), identical or complementary to a polynucleotide sequence disclosed herein, are particularly contemplated as hybridization probes for use in, e.g., Southern and Northern blotting. This would allow a gene product, or fragment thereof, to be analyzed, both in diverse cell types and also in various bacterial cells. The total size of fragment, as well as the size of the complementary stretch(es), will ultimately depend on the intended use or application of the particular nucleic acid segment. Smaller fragments will generally find use in hybridization embodiments, wherein the length of the contiguous complementary region may be varied, such as between about 15 and about 100 nucleotides, but larger contiguous complementarity stretches may be used, according to the length complementary sequences one wishes to detect.

[4678] The use of a hybridization probe of about 15-25 nucleotides in length allows the formation of a duplex molecule that is both stable and selective. Molecules having contiguous complementary sequences over stretches greater than 15 bases in length are generally preferred, though, in order to increase stability and selectivity of the hybrid, and thereby improve the quality and degree of specific hybrid molecules obtained. One will generally prefer to design nucleic acid molecules having gene-complementary stretches of 15 to 25 contiguous nucleotides, or even longer where desired.

[4679] Hybridization probes may be selected from any portion of any of the sequences disclosed herein. All that is required is to review the sequences set forth herein, or to any continuous portion of the sequences, from about 15-25 nucleotides in length up to and including the full length sequence, that one wishes to utilize as a probe or primer. The choice of probe and primer sequences may be governed by various factors. For example, one may wish to employ primers from towards the termini of the total sequence.

[4680] Small polynucleotide segments or fragments may be readily prepared by, for example, directly synthesizing the fragment by chemical means, as is commonly practiced using an automated oligonucleotide synthesizer. Also, fragments may be obtained by application of nucleic acid reproduction technology, such as the PCR™ technology of U.S. Pat. No. 4,683,202 (incorporated herein by reference), by introducing selected sequences into recombinant vectors for recombinant production, and by other recombinant DNA techniques generally known to those of skill in the art of molecular biology.

[4681] The nucleotide sequences of the invention may be used for their ability to selectively form duplex molecules with complementary stretches of the entire gene or gene fragments of interest. Depending on the application envisioned, one will typically desire to employ varying conditions of hybridization to achieve varying degrees of selectivity of probe towards target sequence. For applications requiring high selectivity, one will typically desire to employ relatively stringent conditions to form the hybrids, e.g., one will select relatively low salt and/or high temperature conditions, such as provided by a salt concentration of from about 0.02 M to about 0.15 M salt at temperatures of from about 50° C. to about 70° C. Such selective conditions tolerate little, if any, mismatch between the probe and the template or target strand, and would be particularly suitable for isolating related sequences.

[4682] Of course, for some applications, for example, where one desires to prepare mutants employing a mutant primer strand hybridized to an underlying template, less stringent (reduced stringency) hybridization conditions will typically be needed in order to allow formation of the heteroduplex. In these circumstances, one may desire to employ salt conditions such as those of from about 0.15 M to about 0.9 M salt, at temperatures ranging from about 20° C. to about 55° C. Cross-hybridizing species can thereby be readily identified as positively hybridizing signals with respect to control hybridizations. In any case, it is generally appreciated that conditions can be rendered more stringent by the addition of increasing amounts of formamide, which serves to destabilize the hybrid duplex in the same manner as increased temperature. Thus, hybridization conditions can be readily manipulated, and thus will generally be a method of choice depending on the desired results.

[4683] According to another embodiment of the present invention, polynucleotide compositions comprising antisense oligonucleotides are provided. Antisense oligonucleotides have been demonstrated to be effective and targeted inhibitors of protein synthesis, and, consequently, provide a therapeutic approach by which a disease can be treated by inhibiting the synthesis of proteins that contribute to the disease. The efficacy of antisense oligonucleotides for inhibiting protein synthesis is well established. For example, the synthesis of polygalactauronase and the muscarine type 2 acetylcholine receptor are inhibited by antisense oligonucleotides directed to their respective mRNA sequences (U.S. Pat. No. 5,739,119 and U.S. Pat. No. 5,759,829). Further, examples of antisense inhibition have been demonstrated with the nuclear protein cyclin, the multiple drug resistance gene (MDG1), ICAM-1, E-selectin, STK-1, striatal GABAA receptor and human EGF (Jaskulski et al., Science. 1988 Jun 10;240(4858):1544-6; Vasanthakumar and Ahmed, Cancer Commun. 1989;1(4):225-32; Peris et al., Brain Res Mol Brain Res. 1998 Jun 15;57(2):310-20; U.S. Pat. No. 5,801,154; U.S. Pat. No. 5,789,573; U.S. Pat. No. 5,718,709 and U.S. Pat. No. 5,610,288). Antisense constructs have also been described that inhibit and can be used to treat a variety of abnormal cellular proliferations, e.g. cancer (U.S. Pat. No. 5,747,470; U.S. Pat. No. 5,591,317 and U.S. Pat. No. 5,783,683).

[4684] Therefore, in certain embodiments, the present invention provides oligonucleotide sequences that comprise all, or a portion of, any sequence that is capable of specifically binding to polynucleotide sequence described herein, or a complement thereof. In one embodiment, the antisense oligonucleotides comprise DNA or derivatives thereof. In another embodiment, the oligonucleotides comprise RNA or derivatives thereof. In a third embodiment, the oligonucleotides are modified DNAs comprising a phosphorothioated modified backbone. In a fourth embodiment, the oligonucleotide sequences comprise peptide nucleic acids or derivatives thereof. In each case, preferred compositions comprise a sequence region that is complementary, and more preferably substantially-complementary, and even more preferably, completely complementary to one or more portions of polynucleotides disclosed herein. Selection of antisense compositions specific for a given gene sequence is based upon analysis of the chosen target sequence and determination of secondary structure, Tm, binding energy, and relative stability. Antisense compositions may be selected based upon their relative inability to form dimers, hairpins, or other secondary structures that would reduce or prohibit specific binding to the target mRNA in a host cell. Highly preferred target regions of the mRNA, are those which are at or near the AUG translation initiation codon, and those sequences which are substantially complementary to 5′ regions of the mRNA. These secondary structure analyses and target site selection considerations can be performed, for example, using v.4 of the OLIGO primer analysis software and/or the BLASTN 2.0.5 algorithm software (Altschul et al., Nucleic Acids Res. 1997, 25(17):3389-402).

[4685] The use of an antisense delivery method employing a short peptide vector, termed MPG (27 residues), is also contemplated. The MPG peptide contains a hydrophobic domain derived from the fusion sequence of HIV gp41 and a hydrophilic domain from the nuclear localization sequence of SV40 T-antigen (Morris et al., Nucleic Acids Res. 1997 Jul 15;25(14):2730-6). It has been demonstrated that several molecules of the MPG peptide coat the antisense oligonucleotides and can be delivered into cultured mammalian cells in less than 1 hour with relatively high efficiency (90%). Further, the interaction with MPG strongly increases both the stability of the oligonucleotide to nuclease and the ability to cross the plasma membrane.

[4686] According to another embodiment of the invention, the polynucleotide compositions described herein are used in the design and preparation of ribozyme molecules for inhibiting expression of the tumor polypeptides and proteins of the present invention in tumor cells. Ribozymes are RNA-protein complexes that cleave nucleic acids in a site-specific fashion. Ribozymes have specific catalytic domains that possess endonuclease activity (Kim and Cech, Proc Natl Acad Sci U S A. 1987 Dec;84(24):8788-92; Forster and Symons, Cell. 1987 Apr 24;49(2):211-20). For example, a large number of ribozymes accelerate phosphoester transfer reactions with a high degree of specificity, often cleaving only one of several phosphoesters in an oligonucleotide substrate (Cech et al., Cell. 1981 Dec;27(3 Pt 2):487-96; Michel and Westhof, J Mol Biol. 1990 Dec 5;216(3):585-610; Reinhold-Hurek and Shub, Nature. 1992 May 14;357(6374):173-6). This specificity has been attributed to the requirement that the substrate bind via specific base-pairing interactions to the internal guide sequence (“IGS”) of the ribozyme prior to chemical reaction.

[4687] Six basic varieties of naturally-occurring enzymatic RNAs are known presently. Each can catalyze the hydrolysis of RNA phosphodiester bonds in trans (and thus can cleave other RNA molecules) under physiological conditions. In general, enzymatic nucleic acids act by first binding to a target RNA. Such binding occurs through the target binding portion of a enzymatic nucleic acid which is held in close proximity to an enzymatic portion of the molecule that acts to cleave the target RNA. Thus, the enzymatic nucleic acid first recognizes and then binds a target RNA through complementary base-pairing, and once bound to the correct site, acts enzymatically to cut the target RNA. Strategic cleavage of such a target RNA will destroy its ability to direct synthesis of an encoded protein. After an enzymatic nucleic acid has bound and cleaved its RNA target, it is released from that RNA to search for another target and can repeatedly bind and cleave new targets.

[4688] The enzymatic nature of a ribozyme is advantageous over many technologies, such as antisense technology (where a nucleic acid molecule simply binds to a nucleic acid target to block its translation) since the concentration of ribozyme necessary to affect a therapeutic treatment is lower than that of an antisense oligonucleotide. This advantage reflects the ability of the ribozyme to act enzymatically. Thus, a single ribozyme molecule is able to cleave many molecules of target RNA. In addition, the ribozyme is a highly specific inhibitor, with the specificity of inhibition depending not only on the base pairing mechanism of binding to the target RNA, but also on the mechanism of target RNA cleavage. Single mismatches, or base-substitutions, near the site of cleavage can completely eliminate catalytic activity of a ribozyme. Similar mismatches in antisense molecules do not prevent their action (Woolf et al., Proc Natl Acad Sci U S A. 1992 Aug 15;89(16):7305-9). Thus, the specificity of action of a ribozyme is greater than that of an antisense oligonucleotide binding the same RNA site.

[4689] The enzymatic nucleic acid molecule may be formed in a hammerhead, hairpin, a hepatitis δ virus, group I intron or RNaseP RNA (in association with an RNA guide sequence) or Neurospora VS RNA motif. Examples of hammerhead motifs are described by Rossi et al Nucleic Acids Res. 1992 Sep 11;20(17):4559-65. Examples of hairpin motifs are described by Hampel et al. (Eur. Pat. Appl. Publ. No. EP 0360257), Hampel and Tritz, Biochemistry 1989 Jun 13;28(12):4929-33; Hampel et al., Nucleic Acids Res. 1990 Jan 25;18(2):299-304 and U.S. Pat. No. 5,631,359. An example of the hepatitis δ virus motif is described by Perrotta and Been, Biochemistry. 1992 Dec 1;31(47):11843-52; an example of the RNaseP motif is described by Guerrier-Takada et al., Cell. 1983 Dec;35(3 Pt 2):849-57; Neurospora VS RNA ribozyme motif is described by Collins (Saville and Collins, Cell. 1990 May 18;61(4):685-96; Saville and Collins, Proc Natl Acad Sci U S A. 1991 Oct 1;88(19):8826-30; Collins and Olive, Biochemistry. 1993 Mar 23;32(11):2795-9); and an example of the Group I intron is described in (U.S. Pat. No. 4,987,071). All that is important in an enzymatic nucleic acid molecule of this invention is that it has a specific substrate binding site which is complementary to one or more of the target gene RNA regions, and that it have nucleotide sequences within or surrounding that substrate binding site which impart an RNA cleaving activity to the molecule. Thus the ribozyme constructs need not be limited to specific motifs mentioned herein.

[4690] Ribozymes may be designed as described in Int. Pat. Appl. Publ. No. WO 93/23569 and Int. Pat. Appl. Publ. No. WO 94/02595, each specifically incorporated herein by reference) and synthesized to be tested in vitro and in vivo, as described. Such ribozymes can also be optimized for delivery. While specific examples are provided, those in the art will recognize that equivalent RNA targets in other species can be utilized when necessary.

[4691] Ribozyme activity can be optimized by altering the length of the ribozyme binding arms, or chemically synthesizing ribozymes with modifications that prevent their degradation by serum ribonucleases (see e.g, Int. Pat. Appl. Publ. No. WO 92/07065; Int. Pat. Appl. Publ. No. WO 93/15187; Int. Pat. Appl. Publ. No. WO 91/03162; Eur. Pat. Appl. Publ. No. 92110298.4; U.S. Pat. No. 5,334,711; and Int. Pat. Appl. Publ. No. WO 94/13688, which describe various chemical modifications that can be made to the sugar moieties of enzymatic RNA molecules), modifications which enhance their efficacy in cells, and removal of stem II bases to shorten RNA synthesis times and reduce chemical requirements.

[4692] Sullivan et al. (Int. Pat. Appl. Publ. No. WO 94/02595) describes the general methods for delivery of enzymatic RNA molecules. Ribozymes may be administered to cells by a variety of methods known to those familiar to the art, including, but not restricted to, encapsulation in liposomes, by iontophoresis, or by incorporation into other vehicles, such as hydrogels, cyclodextrins, biodegradable nanocapsules, and bioadhesive microspheres. For some indications, ribozymes may be directly delivered ex vivo to cells or tissues with or without the aforementioned vehicles. Alternatively, the RNA/vehicle combination may be locally delivered by direct inhalation, by direct injection or by use of a catheter, infusion pump or stent. Other routes of delivery include, but are not limited to, intravascular, intramuscular, subcutaneous or joint injection, aerosol inhalation, oral (tablet or pill form), topical, systemic, ocular, intraperitoneal and/or intrathecal delivery. More detailed descriptions of ribozyme delivery and administration are provided in Int. Pat. Appl. Publ. No. WO 94/02595 and Int. Pat. Appl. Publ. No. WO 93/23569, each specifically incorporated herein by reference.

[4693] Another means of accumulating high concentrations of a ribozyme(s) within cells is to incorporate the ribozyme-encoding sequences into a DNA expression vector. Transcription of the ribozyme sequences are driven from a promoter for eukaryotic RNA polymerase I (pol I), RNA polymerase II (pol II), or RNA polymerase III (pol III). Transcripts from pol II or pol III promoters will be expressed at high levels in all cells; the levels of a given pol II promoter in a given cell type will depend on the nature of the gene regulatory sequences (enhancers, silencers, etc.) present nearby. Prokaryotic RNA polymerase promoters may also be used, providing that the prokaryotic RNA polymerase enzyme is expressed in the appropriate cells. Ribozymes expressed from such promoters have been shown to function in mammalian cells. Such transcription units can be incorporated into a variety of vectors for introduction into mammalian cells, including but not restricted to, plasmid DNA vectors, viral DNA vectors (such as adenovirus or adeno-associated vectors), or viral RNA vectors (such as retroviral, semliki forest virus, sindbis virus vectors).

[4694] In another embodiment of the invention, peptide nucleic acids (PNAs) compositions are provided. PNA is a DNA mimic in which the nucleobases are attached to a pseudopeptide backbone (Good and Nielsen, Antisense Nucleic Acid Drug Dev. 1997 7(4) 431-37). PNA is able to be utilized in a number methods that traditionally have used RNA or DNA. Often PNA sequences perform better in techniques than the corresponding RNA or DNA sequences and have utilities that are not inherent to RNA or DNA. A review of PNA including methods of making, characteristics of, and methods of using, is provided by Corey (Trends Biotechnol 1997 Jun;15(6):224-9). As such, in certain embodiments, one may prepare PNA sequences that are complementary to one or more portions of the ACE mRNA sequence, and such PNA compositions may be used to regulate, alter, decrease, or reduce the translation of ACE-specific mRNA, and thereby alter the level of ACE activity in a host cell to which such PNA compositions have been administered.

[4695] PNAs have 2-aminoethyl-glycine linkages replacing the normal phosphodiester backbone of DNA (Nielsen et al., Science 1991 Dec 6;254(5037):1497-500; Hanvey et al., Science. 1992 Nov 27;258(5087):1481-5; Hyrup and Nielsen, Bioorg Med Chem. 1996 Jan;4(1):5-23). This chemistry has three important consequences: firstly, in contrast to DNA or phosphorothioate oligonucleotides, PNAs are neutral molecules; secondly, PNAs are achiral, which avoids the need to develop a stereoselective synthesis; and thirdly, PNA synthesis uses standard Boc or Fmoc protocols for solid-phase peptide synthesis, although other methods, including a modified Merrifield method, have been used.

[4696] PNA monomers or ready-made oligomers are commercially available from PerSeptive Biosystems (Framingham, Mass.). PNA syntheses by either Boc or Fmoc protocols are straightforward using manual or automated protocols (Norton et al., Bioorg Med Chem. 1995 Apr;3(4):437-45). The manual protocol lends itself to the production of chemically modified PNAs or the simultaneous synthesis of families of closely related PNAs.

[4697] As with peptide synthesis, the success of a particular PNA synthesis will depend on the properties of the chosen sequence. For example, while in theory PNAs can incorporate any combination of nucleotide bases, the presence of adjacent purines can lead to deletions of one or more residues in the product. In expectation of this difficulty, it is suggested that, in producing PNAs with adjacent purines, one should repeat the coupling of residues likely to be added inefficiently. This should be followed by the purification of PNAs by reverse-phase high-pressure liquid chromatography, providing yields and purity of product similar to those observed during the synthesis of peptides.

[4698] Modifications of PNAs for a given application may be accomplished by coupling amino acids during solid-phase synthesis or by attaching compounds that contain a carboxylic acid group to the exposed N-terminal amine. Alternatively, PNAs can be modified after synthesis by coupling to an introduced lysine or cysteine. The ease with which PNAs can be modified facilitates optimization for better solubility or for specific functional requirements. Once synthesized, the identity of PNAs and their derivatives can be confirmed by mass spectrometry. Several studies have made and utilized modifications of PNAs (for example, Norton et al., Bioorg Med Chem. 1995 Apr;3(4):437-45; Petersen et al., J Pept Sci. 1995 May-Jun;1(3):175-83; Orum et al., Biotechniques. 1995 Sep;19(3):472-80; Footer et al., Biochemistry. 1996 Aug 20;35(33):10673-9; Griffith et al., Nucleic Acids Res. 1995 Aug 11;23(15):3003-8; Pardridge et al., Proc Natl Acad Sci U S A. 1995 Jun 6;92(12):5592-6; Boffa et al., Proc Natl Acad Sci U S A. 1995 Mar 14;92(6):1901-5; Gambacorti-Passerini et al., Blood. 1996 Aug 15;88(4):1411-7; Armitage et al., Proc Natl Acad Sci U S A. 1997 Nov 11;94(23):12320-5; Seeger et al., Biotechniques. 1997 Sep;23(3):512-7). U.S. Pat. No. 5,700,922 discusses PNA-DNA-PNA chimeric molecules and their uses in diagnostics, modulating protein in organisms, and treatment of conditions susceptible to therapeutics.

[4699] Methods of characterizing the antisense binding properties of PNAs are discussed in Rose (Anal Chem. 1993 Dec 15;65(24):3545-9) and Jensen et al. (Biochemistry. 1997 Apr 22;36(16):5072-7). Rose uses capillary gel electrophoresis to determine binding of PNAs to their complementary oligonucleotide, measuring the relative binding kinetics and stoichiometry. Similar types of measurements were made by Jensen et al. using BIAcore™ technology.

[4700] Other applications of PNAs that have been described and will be apparent to the skilled artisan include use in DNA strand invasion, antisense inhibition, mutational analysis, enhancers of transcription, nucleic acid purification, isolation of transcriptionally active genes, blocking of transcription factor binding, genome cleavage, biosensors, in situ hybridization, and the like.

[4701] Polynucleotide Identification, Characterization and Expression

[4702] Polynucleotides compositions of the present invention may be identified, prepared and/or manipulated using any of a variety of well established techniques (see generally, Sambrook et al., Molecular Cloning: A Laboratory Manual, Cold Spring Harbor Laboratories, Cold Spring Harbor, N.Y., 1989, and other like references). For example, a polynucleotide may be identified, as described in more detail below, by screening a microarray of cDNAs for tumor-associated expression (i.e., expression that is at least two fold greater in a tumor than in normal tissue, as determined using a representative assay provided herein). Such screens may be performed, for example, using the microarray technology of Affymetrix, Inc. (Santa Clara, Calif.) according to the manufacturer's instructions (and essentially as described by Schena et al., Proc. Natl. Acad. Sci. USA 93:10614-10619, 1996 and Heller et al., Proc. Natl. Acad. Sci. USA 94:2150-2155, 1997). Alternatively, polynucleotides may be amplified from cDNA prepared from cells expressing the proteins described herein, such as tumor cells.

[4703] Many template dependent processes are available to amplify a target sequences of interest present in a sample. One of the best known amplification methods is the polymerase chain reaction (PCR™) which is described in detail in U.S. Pat. Nos. 4,683,195, 4,683,202 and 4,800,159, each of which is incorporated herein by reference in its entirety. Briefly, in PCR™, two primer sequences are prepared which are complementary to regions on opposite complementary strands of the target sequence. An excess of deoxynucleoside triphosphates is added to a reaction mixture along with a DNA polymerase (e.g., Taq polymerase). If the target sequence is present in a sample, the primers will bind to the target and the polymerase will cause the primers to be extended along the target sequence by adding on nucleotides. By raising and lowering the temperature of the reaction mixture, the extended primers will dissociate from the target to form reaction products, excess primers will bind to the target and to the reaction product and the process is repeated. Preferably reverse transcription and PCR™ amplification procedure may be performed in order to quantify the amount of mRNA amplified. Polymerase chain reaction methodologies are well known in the art.

[4704] Any of a number of other template dependent processes, many of which are variations of the PCR™ amplification technique, are readily known and available in the art. Illustratively, some such methods include the ligase chain reaction (referred to as LCR), described, for example, in Eur. Pat. Appl. Publ. No. 320,308 and U.S. Pat. No. 4,883,750; Qbeta Replicase, described in PCT Intl. Pat. Appl. Publ. No. PCT/US87/00880; Strand Displacement Amplification (SDA) and Repair Chain Reaction (RCR). Still other amplification methods are described in Great Britain Pat. Appl. No. 2202328, and in PCT Intl. Pat. Appl. Pubi. No. PCT/US89/01025. Other nucleic acid amplification procedures include transcription-based amplification systems (TAS) (PCT Intl. Pat. Appl. Publ. No. WO 88/10315), including nucleic acid sequence based amplification (NASBA) and 3SR. Eur. Pat. Appl. Publ. No. 329,822 describes a nucleic acid amplification process involving cyclically synthesizing single-stranded RNA (“ssRNA”), ssDNA, and double-stranded DNA (dsDNA). PCT Intl. Pat. Appl. Publ. No. WO 89/06700 describes a nucleic acid sequence amplification scheme based on the hybridization of a promoter/primer sequence to a target single-stranded DNA (“ssDNA”) followed by transcription of many RNA copies of the sequence. Other amplification methods such as “RACE” (Frohman, 1990), and “one-sided PCR” (Ohara, 1989) are also well-known to those of skill in the art.

[4705] An amplified portion of a polynucleotide of the present invention may be used to isolate a full length gene from a suitable library (e.g., a tumor cDNA library) using well known techniques. Within such techniques, a library (cDNA or genomic) is screened using one or more polynucleotide probes or primers suitable for amplification. Preferably, a library is size-selected to include larger molecules. Random primed libraries may also be preferred for identifying 5′ and upstream regions of genes. Genomic libraries are preferred for obtaining introns and extending 5′ sequences.

[4706] For hybridization techniques, a partial sequence may be labeled (e.g., by nick-translation or end-labeling with ³²P) using well known techniques. A bacterial or bacteriophage library is then generally screened by hybridizing filters containing denatured bacterial colonies (or lawns containing phage plaques) with the labeled probe (see Sambrook et al., Molecular Cloning: A Laboratory Manual, Cold Spring Harbor Laboratories, Cold Spring Harbor, N.Y., 1989). Hybridizing colonies or plaques are selected and expanded, and the DNA is isolated for further analysis. cDNA clones may be analyzed to determine the amount of additional sequence by, for example, PCR using a primer from the partial sequence and a primer from the vector. Restriction maps and partial sequences may be generated to identify one or more overlapping clones. The complete sequence may then be determined using standard techniques, which may involve generating a series of deletion clones. The resulting overlapping sequences can then assembled into a single contiguous sequence. A full length cDNA molecule can be generated by ligating suitable fragments, using well known techniques.

[4707] Alternatively, amplification techniques, such as those described above, can be useful for obtaining a full length coding sequence from a partial cDNA sequence. One such amplification technique is inverse PCR (see Triglia et al., Nucl. Acids Res. 16:8186, 1988), which uses restriction enzymes to generate a fragment in the known region of the gene. The fragment is then circularized by intramolecular ligation and used as a template for PCR with divergent primers derived from the known region. Within an alternative approach, sequences adjacent to a partial sequence may be retrieved by amplification with a primer to a linker sequence and a primer specific to a known region. The amplified sequences are typically subjected to a second round of amplification with the same linker primer and a second primer specific to the known region. A variation on this procedure, which employs two primers that initiate extension in opposite directions from the known sequence, is described in WO 96/38591. Another such technique is known as “rapid amplification of cDNA ends” or RACE. This technique involves the use of an internal primer and an external primer, which hybridizes to a polyA region or vector sequence, to identify sequences that are 5′ and 3′ of a known sequence. Additional techniques include capture PCR (Lagerstrom et al., PCR Methods Applic. 1:111-19, 1991) and walking PCR (Parker et al., Nucl. Acids. Res. 19:3055-60, 1991). Other methods employing amplification may also be employed to obtain a full length cDNA sequence.

[4708] In certain instances, it is possible to obtain a full length cDNA sequence by analysis of sequences provided in an expressed sequence tag (EST) database, such as that available from GenBank. Searches for overlapping ESTs may generally be performed using well known programs (e.g., NCBI BLAST searches), and such ESTs may be used to generate a contiguous full length sequence. Full length DNA sequences may also be obtained by analysis of genomic fragments.

[4709] In other embodiments of the invention, polynucleotide sequences or fragments thereof which encode polypeptides of the invention, or fusion proteins or functional equivalents thereof, may be used in recombinant DNA molecules to direct expression of a polypeptide in appropriate host cells. Due to the inherent degeneracy of the genetic code, other DNA sequences that encode substantially the same or a functionally equivalent amino acid sequence may be produced and these sequences may be used to clone and express a given polypeptide.

[4710] As will be understood by those of skill in the art, it may be advantageous in some instances to produce polypeptide-encoding nucleotide sequences possessing non-naturally occurring codons. For example, codons preferred by a particular prokaryotic or eukaryotic host can be selected to increase the rate of protein expression or to produce a recombinant RNA transcript having desirable properties, such as a half-life which is longer than that of a transcript generated from the naturally occurring sequence.

[4711] Moreover, the polynucleotide sequences of the present invention can be engineered using methods generally known in the art in order to alter polypeptide encoding sequences for a variety of reasons, including but not limited to, alterations which modify the cloning, processing, and/or expression of the gene product. For example, DNA shuffling by random fragmentation and PCR reassembly of gene fragments and synthetic oligonucleotides may be used to engineer the nucleotide sequences. In addition, site-directed mutagenesis may be used to insert new restriction sites, alter glycosylation patterns, change codon preference, produce splice variants, or introduce mutations, and so forth.

[4712] In another embodiment of the invention, natural, modified, or recombinant nucleic acid sequences may be ligated to a heterologous sequence to encode a fusion protein. For example, to screen peptide libraries for inhibitors of polypeptide activity, it may be useful to encode a chimeric protein that can be recognized by a commercially available antibody. A fusion protein may also be engineered to contain a cleavage site located between the polypeptide-encoding sequence and the heterologous protein sequence, so that the polypeptide may be cleaved and purified away from the heterologous moiety.

[4713] Sequences encoding a desired polypeptide may be synthesized, in whole or in part, using chemical methods well known in the art (see Caruthers, M. H. et al. (1980) Nucl. Acids Res. Symp. Ser. 215-223, Horn, T. et al. (1980) Nucl. Acids Res. Symp. Ser. 225-232). Alternatively, the protein itself may be produced using chemical methods to synthesize the amino acid sequence of a polypeptide, or a portion thereof. For example, peptide synthesis can be performed using various solid-phase techniques (Roberge, J. Y. et al. (1995) Science 269:202-204) and automated synthesis may be achieved, for example, using the ABI 431A Peptide Synthesizer (Perkin Elmer, Palo Alto, Calif.).

[4714] A newly synthesized peptide may be substantially purified by preparative high performance liquid chromatography (e.g., Creighton, T. (1983) Proteins, Structures and Molecular Principles, WH Freeman and Co., New York, N.Y.) or other comparable techniques available in the art. The composition of the synthetic peptides may be confirmed by amino acid analysis or sequencing (e.g., the Edman degradation procedure). Additionally, the amino acid sequence of a polypeptide, or any part thereof, may be altered during direct synthesis and/or combined using chemical methods with sequences from other proteins, or any part thereof, to produce a variant polypeptide.

[4715] In order to express a desired polypeptide, the nucleotide sequences encoding the polypeptide, or functional equivalents, may be inserted into appropriate expression vector, i.e., a vector which contains the necessary elements for the transcription and translation of the inserted coding sequence. Methods which are well known to those skilled in the art may be used to construct expression vectors containing sequences encoding a polypeptide of interest and appropriate transcriptional and translational control elements. These methods include in vitro recombinant DNA techniques, synthetic techniques, and in vivo genetic recombination. Such techniques are described, for example, in Sambrook, J. et al. (1989) Molecular Cloning, A Laboratory Manual, Cold Spring Harbor Press, Plainview, N.Y., and Ausubel, F. M. et al. (1989) Current Protocols in Molecular Biology, John Wiley & Sons, New York. N.Y.

[4716] A variety of expression vector/host systems may be utilized to contain and express polynucleotide sequences. These include, but are not limited to, microorganisms such as bacteria transformed with recombinant bacteriophage, plasmid, or cosmid DNA expression vectors; yeast transformed with yeast expression vectors; insect cell systems infected with virus expression vectors (e.g., baculovirus); plant cell systems transformed with virus expression vectors (e.g., cauliflower mosaic virus, CaMV; tobacco mosaic virus, TMV) or with bacterial expression vectors (e.g., Ti or pBR322 plasmids); or animal cell systems.

[4717] The “control elements” or “regulatory sequences” present in an expression vector are those non-translated regions of the vector—enhancers, promoters, 5′ and 3′ untranslated regions—which interact with host cellular proteins to carry out transcription and translation. Such elements may vary in their strength and specificity. Depending on the vector system and host utilized, any number of suitable transcription and translation elements, including constitutive and inducible promoters, may be used. For example, when cloning in bacterial systems, inducible promoters such as the hybrid lacZ promoter of the pBLUESCRIPT phagemid (Stratagene, La Jolla, Calif.) or pSPORT1 plasmid (Gibco BRL, Gaithersburg, Md.) and the like may be used. In mammalian cell systems, promoters from mammalian genes or from mammalian viruses are generally preferred. If it is necessary to generate a cell line that contains multiple copies of the sequence encoding a polypeptide, vectors based on SV40 or EBV may be advantageously used with an appropriate selectable marker.

[4718] In bacterial systems, any of a number of expression vectors may be selected depending upon the use intended for the expressed polypeptide. For example, when large quantities are needed, for example for the induction of antibodies, vectors which direct high level expression of fusion proteins that are readily purified may be used. Such vectors include, but are not limited to, the multifunctional E. coli cloning and expression vectors such as pBLUESCRIPT (Stratagene), in which the sequence encoding the polypeptide of interest may be ligated into the vector in frame with sequences for the amino-terminal Met and the subsequent 7 residues of .beta.-galactosidase so that a hybrid protein is produced; pIN vectors (Van Heeke, G. and S. M. Schuster (1989) J. Biol. Chem. 264:5503-5509); and the like. pGEX Vectors (Promega, Madison, Wis.) may also be used to express foreign polypeptides as fusion proteins with glutathione S-transferase (GST). In general, such fusion proteins are soluble and can easily be purified from lysed cells by adsorption to glutathione-agarose beads followed by elution in the presence of free glutathione. Proteins made in such systems may be designed to include heparin, thrombin, or factor XA protease cleavage sites so that the cloned polypeptide of interest can be released from the GST moiety at will.

[4719] In the yeast, Saccharomyces cerevisiae, a number of vectors containing constitutive or inducible promoters such as alpha factor, alcohol oxidase, and PGH may be used. For reviews, see Ausubel et al. (supra) and Grant et al. (1987) Methods Enzymol. 153:516-544.

[4720] In cases where plant expression vectors are used, the expression of sequences encoding polypeptides may be driven by any of a number of promoters. For example, viral promoters such as the 35S and 19S promoters of CaMV may be used alone or in combination with the omega leader sequence from TMV (Takamatsu, N. (1987) EMBO J. 6:307-311. Alternatively, plant promoters such as the small subunit of RUBISCO or heat shock promoters may be used (Coruzzi, G et al. (1984) EMBO J 3:1671-1680; Broglie, R. et al. (1984) Science 224:838-843; and Winter, J. et al. (1991) Results Probl. Cell Differ. 17:85-105). These constructs can be introduced into plant cells by direct DNA transformation or pathogen-mediated transfection. Such techniques are described in a number of generally available reviews (see, for example, Hobbs, S. or Murry, L. E. in McGraw Hill Yearbook of Science and Technology (1992) McGraw Hill, New York, N.Y.; pp. 191-196).

[4721] An insect system may also be used to express a polypeptide of interest. For example, in one such system, Autographa californica nuclear polyhedrosis virus (AcNPV) is used as a vector to express foreign genes in Spodoptera frugiperda cells or in Trichoplusia larvae. The sequences encoding the polypeptide may be cloned into a non-essential region of the virus, such as the polyhedrin gene, and placed under control of the polyhedrin promoter. Successful insertion of the polypeptide-encoding sequence will render the polyhedrin gene inactive and produce recombinant virus lacking coat protein. The recombinant viruses may then be used to infect, for example, S. frugiperda cells or Trichoplusia larvae in which the polypeptide of interest may be expressed (Engelhard, E. K. et al. (1994) Proc. Natl. Acad Sci. 91:3224-3227).

[4722] In mammalian host cells, a number of viral-based expression systems are generally available. For example, in cases where an adenovirus is used as an expression vector, sequences encoding a polypeptide of interest may be ligated into an adenovirus transcription/translation complex consisting of the late promoter and tripartite leader sequence. Insertion in a non-essential E1 or E3 region of the viral genome may be used to obtain a viable virus which is capable of expressing the polypeptide in infected host cells (Logan, J. and Shenk, T. (1984) Proc. Natl. Acad. Sci. 81:3655-3659). In addition, transcription enhancers, such as the Rous sarcoma virus (RSV) enhancer, may be used to increase expression in mammalian host cells.

[4723] Specific initiation signals may also be used to achieve more efficient translation of sequences encoding a polypeptide of interest. Such signals include the ATG initiation codon and adjacent sequences. In cases where sequences encoding the polypeptide, its initiation codon, and upstream sequences are inserted into the appropriate expression vector, no additional transcriptional or translational control signals may be needed. However, in cases where only coding sequence, or a portion thereof, is inserted, exogenous translational control signals including the ATG initiation codon should be provided. Furthermore, the initiation codon should be in the correct reading frame to ensure translation of the entire insert. Exogenous translational elements and initiation codons may be of various origins, both natural and synthetic. The efficiency of expression may be enhanced by the inclusion of enhancers which are appropriate for the particular cell system which is used, such as those described in the literature (Scharf, D. et al. (1994) Results Probl. Cell Differ. 20:125-162).

[4724] In addition, a host cell strain may be chosen for its ability to modulate the expression of the inserted sequences or to process the expressed protein in the desired fashion. Such modifications of the polypeptide include, but are not limited to, acetylation, carboxylation, glycosylation, phosphorylation, lipidation, and acylation. Post-translational processing which cleaves a “prepro” form of the protein may also be used to facilitate correct insertion, folding and/or function. Different host cells such as CHO, COS, HeLa, MDCK, HEK293, and WI38, which have specific cellular machinery and characteristic mechanisms for such post-translational activities, may be chosen to ensure the correct modification and processing of the foreign protein.

[4725] For long-term, high-yield production of recombinant proteins, stable expression is generally preferred. For example, cell lines which stably express a polynucleotide of interest may be transformed using expression vectors which may contain viral origins of replication and/or endogenous expression elements and a selectable marker gene on the same or on a separate vector. Following the introduction of the vector, cells may be allowed to grow for 1-2 days in an enriched media before they are switched to selective media. The purpose of the selectable marker is to confer resistance to selection, and its presence allows growth and recovery of cells which successfully express the introduced sequences. Resistant clones of stably transformed cells may be proliferated using tissue culture techniques appropriate to the cell type.

[4726] Any number of selection systems may be used to recover transformed cell lines. These include, but are not limited to, the herpes simplex virus thymidine kinase (Wigler, M. et al. (1977) Cell 11:223-32) and adenine phosphoribosyltransferase (Lowy, I. et al. (1990) Cell 22:817-23) genes which can be employed in tk.sup.- or aprt.sup.-cells, respectively. Also, antimetabolite, antibiotic or herbicide resistance can be used as the basis for selection; for example, dhfr which confers resistance to methotrexate (Wigler, M. et al. (1980) Proc. Natl. Acad. Sci. 77:3567-70); npt, which confers resistance to the aminoglycosides, neomycin and G-418 (Colbere-Garapin, F. et al (1981) J. Mol. Biol. 150:1-14); and als or pat, which confer resistance to chlorsulfuron and phosphinotricin acetyltransferase, respectively (Murry, supra). Additional selectable genes have been described, for example, trpB, which allows cells to utilize indole in place of tryptophan, or hisD, which allows cells to utilize histinol in place of histidine (Hartman, S. C. and R. C. Mulligan (1988) Proc. Natl. Acad. Sci. 85:8047-51). The use of visible markers has gained popularity with such markers as anthocyanins, beta-glucuronidase and its substrate GUS, and luciferase and its substrate luciferin, being widely used not only to identify transformants, but also to quantify the amount of transient or stable protein expression attributable to a specific vector system (Rhodes, C. A. et al. (1995) Methods Mol. Biol. 55:121-131).

[4727] Although the presence/absence of marker gene expression suggests that the gene of interest is also present, its presence and expression may need to be confirmed. For example, if the sequence encoding a polypeptide is inserted within a marker gene sequence, recombinant cells containing sequences can be identified by the absence of marker gene function. Alternatively, a marker gene can be placed in tandem with a polypeptide-encoding sequence under the control of a single promoter. Expression of the marker gene in response to induction or selection usually indicates expression of the tandem gene as well.

[4728] Alternatively, host cells that contain and express a desired polynucleotide sequence may be identified by a variety of procedures known to those of skill in the art. These procedures include, but are not limited to, DNA-DNA or DNA-RNA hybridizations and protein bioassay or immunoassay techniques which include, for example, membrane, solution, or chip based technologies for the detection and/or quantification of nucleic acid or protein.

[4729] A variety of protocols for detecting and measuring the expression of polynucleotide-encoded products, using either polyclonal or monoclonal antibodies specific for the product are known in the art. Examples include enzyme-linked immunosorbent assay (ELISA), radioimmunoassay (RIA), and fluorescence activated cell sorting (FACS). A two-site, monoclonal-based immunoassay utilizing monoclonal antibodies reactive to two non-interfering epitopes on a given polypeptide may be preferred for some applications, but a competitive binding assay may also be employed. These and other assays are described, among other places, in Hampton, R. et al. (1990; Serological Methods, a Laboratory Manual, APS Press, St Paul. Minn.) and Maddox, D. E. et al. (1983; J. Exp. Med. 158:1211-1216).

[4730] A wide variety of labels and conjugation techniques are known by those skilled in the art and may be used in various nucleic acid and amino acid assays. Means for producing labeled hybridization or PCR probes for detecting sequences related to polynucleotides include oligolabeling, nick translation, end-labeling or PCR amplification using a labeled nucleotide. Alternatively, the sequences, or any portions thereof may be cloned into a vector for the production of an mRNA probe. Such vectors are known in the art, are commercially available, and may be used to synthesize RNA probes in vitro by addition of an appropriate RNA polymerase such as T7, T3, or SP6 and labeled nucleotides. These procedures may be conducted using a variety of commercially available kits. Suitable reporter molecules or labels, which may be used include radionuclides, enzymes, fluorescent, chemiluminescent, or chromogenic agents as well as substrates, cofactors, inhibitors, magnetic particles, and the like.

[4731] Host cells transformed with a polynucleotide sequence of interest may be cultured under conditions suitable for the expression and recovery of the protein from cell culture. The protein produced by a recombinant cell may be secreted or contained intracellularly depending on the sequence and/or the vector used. As will be understood by those of skill in the art, expression vectors containing polynucleotides of the invention may be designed to contain signal sequences which direct secretion of the encoded polypeptide through a prokaryotic or eukaryotic cell membrane. Other recombinant constructions may be used to join sequences encoding a polypeptide of interest to nucleotide sequence encoding a polypeptide domain which will facilitate purification of soluble proteins. Such purification facilitating domains include, but are not limited to, metal chelating peptides such as histidine-tryptophan modules that allow purification on immobilized metals, protein A domains that allow purification on immobilized immunoglobulin, and the domain utilized in the FLAGS extension/affinity purification system (Immunex Corp., Seattle, Wash.). The inclusion of cleavable linker sequences such as those specific for Factor XA or enterokinase (Invitrogen. San Diego, Calif.) between the purification domain and the encoded polypeptide may be used to facilitate purification. One such expression vector provides for expression of a fusion protein containing a polypeptide of interest and a nucleic acid encoding 6 histidine residues preceding a thioredoxin or an enterokinase cleavage site. The histidine residues facilitate purification on IMIAC (immobilized metal ion affinity chromatography) as described in Porath, J. et al. (1992, Prot. Exp. Purif 3:263-281) while the enterokinase cleavage site provides a means for purifying the desired polypeptide from the fusion protein. A discussion of vectors which contain fusion proteins is provided in Kroll, D. J. et al. (1993; DNA Cell Biol. 12:441-453).

[4732] In addition to recombinant production methods, polypeptides of the invention, and fragments thereof, may be produced by direct peptide synthesis using solid-phase techniques (Merrifield J. (1963) J. Am. Chem. Soc. 85:2149-2154). Protein synthesis may be performed using manual techniques or by automation. Automated synthesis may be achieved, for example, using Applied Biosystems 431A Peptide Synthesizer (Perkin Elmer). Alternatively, various fragments may be chemically synthesized separately and combined using chemical methods to produce the full length molecule.

[4733] Antibody Compositions, Fragments Thereof and Other Binding Agents

[4734] According to another aspect, the present invention further provides binding agents, such as antibodies and antigen-binding fragments thereof, that exhibit immunological binding to a tumor polypeptide disclosed herein, or to a portion, variant or derivative thereof. An antibody, or antigen-binding fragment thereof, is said to “specifically bind,” “immunogically bind,” and/or is “immunologically reactive” to a polypeptide of the invention if it reacts at a detectable level (within, for example, an ELISA assay) with the polypeptide, and does not react detectably with unrelated polypeptides under similar conditions.

[4735] Immunological binding, as used in this context, generally refers to the non-covalent interactions of the type which occur between an immunoglobulin molecule and an antigen for which the immunoglobulin is specific. The strength, or affinity of immunological binding interactions can be expressed in terms of the dissociation constant (K_{d}) of the interaction, wherein a smaller K_{d} represents a greater affinity. Immunological binding properties of selected polypeptides can be quantified using methods well known in the art. One such method entails measuring the rates of antigen-binding site/antigen complex formation and dissociation, wherein those rates depend on the concentrations of the complex partners, the affinity of the interaction, and on geometric parameters that equally influence the rate in both directions. Thus, both the “on rate constant” (Kₒₙ) and the “off rate constant” (K_{off}) can be determined by calculation of the concentrations and the actual rates of association and dissociation. The ratio of K_{off}/Kₒₙ enables cancellation of all parameters not related to affinity, and is thus equal to the dissociation constant K_{d}. See, generally, Davies et al. (1990) Annual Rev. Biochem. 59:439-473.

[4736] An “antigen-binding site,” or “binding portion” of an antibody refers to the part of the immunoglobulin molecule that participates in antigen binding. The antigen binding site is formed by amino acid residues of the N-terminal variable (“V”) regions of the heavy (“H”) and light (“L”) chains. Three highly divergent stretches within the V regions of the heavy and light chains are referred to as “hypervariable regions” which are interposed between more conserved flanking stretches known as “framework regions,” or “FRs”. Thus the term “FR” refers to amino acid sequences which are naturally found between and adjacent to hypervariable regions in immunoglobulins. In an antibody molecule, the three hypervariable regions of a light chain and the three hypervariable regions of a heavy chain are disposed relative to each other in three dimensional space to form an antigen-binding surface. The antigen-binding surface is complementary to the three-dimensional surface of a bound antigen, and the three hypervariable regions of each of the heavy and light chains are referred to as “complementarity-determining regions,” or “CDRs.”

[4737] Binding agents may be further capable of differentiating between patients with and without a cancer, such as pancreatic cancer, using the representative assays provided herein. For example, antibodies or other binding agents that bind to a tumor protein will preferably generate a signal indicating the presence of a cancer in at least about 20% of patients with the disease, more preferably at least about 30% of patients. Alternatively, or in addition, the antibody will generate a negative signal indicating the absence of the disease in at least about 90% of individuals without the cancer. To determine whether a binding agent satisfies this requirement, biological samples (e.g., blood, sera, sputum, urine and/or tumor biopsies) from patients with and without a cancer (as determined using standard clinical tests) may be assayed as described herein for the presence of polypeptides that bind to the binding agent. Preferably, a statistically significant number of samples with and without the disease will be assayed. Each binding agent should satisfy the above criteria; however, those of ordinary skill in the art will recognize that binding agents may be used in combination to improve sensitivity.

[4738] Any agent that satisfies the above requirements may be a binding agent. For example, a binding agent may be a ribosome, with or without a peptide component, an RNA molecule or a polypeptide. In a preferred embodiment, a binding agent is an antibody or an antigen-binding fragment thereof. Antibodies may be prepared by any of a variety of techniques known to those of ordinary skill in the art. See, e.g., Harlow and Lane, Antibodies. A Laboratory Manual, Cold Spring Harbor Laboratory, 1988. In general, antibodies can be produced by cell culture techniques, including the generation of monoclonal antibodies as described herein, or via transfection of antibody genes into suitable bacterial or mammalian cell hosts, in order to allow for the production of recombinant antibodies. In one technique, an immunogen comprising the polypeptide is initially injected into any of a wide variety of mammals (e.g., mice, rats, rabbits, sheep or goats). In this step, the polypeptides of this invention may serve as the immunogen without modification. Alternatively, particularly for relatively short polypeptides, a superior immune response may be elicited if the polypeptide is joined to a carrier protein, such as bovine serum albumin or keyhole limpet hemocyanin. The immunogen is injected into the animal host, preferably according to a predetermined schedule incorporating one or more booster immunizations, and the animals are bled periodically. Polyclonal antibodies specific for the polypeptide may then be purified from such antisera by, for example, affinity chromatography using the polypeptide coupled to a suitable solid support.

[4739] Monoclonal antibodies specific for an antigenic polypeptide of interest may be prepared, for example, using the technique of Kohler and Milstein, Eur. J. Immunol. 6:511-519, 1976, and improvements thereto. Briefly, these methods involve the preparation of immortal cell lines capable of producing antibodies having the desired specificity (i e., reactivity with the polypeptide of interest). Such cell lines may be produced, for example, from spleen cells obtained from an animal immunized as described above. The spleen cells are then immortalized by, for example, fusion with a myeloma cell fusion partner, preferably one that is syngeneic with the immunized animal. A variety of fusion techniques may be employed. For example, the spleen cells and myeloma cells may be combined with a nonionic detergent for a few minutes and then plated at low density on a selective medium that supports the growth of hybrid cells, but not myeloma cells. A preferred selection technique uses HAT (hypoxanthine, aminopterin, thymidine) selection. After a sufficient time, usually about 1 to 2 weeks, colonies of hybrids are observed. Single colonies are selected and their culture supernatants tested for binding activity against the polypeptide. Hybridomas having high reactivity and specificity are preferred.

[4740] Monoclonal antibodies may be isolated from the supernatants of growing hybridoma colonies. In addition, various techniques may be employed to enhance the yield, such as injection of the hybridoma cell line into the peritoneal cavity of a suitable vertebrate host, such as a mouse. Monoclonal antibodies may then be harvested from the ascites fluid or the blood. Contaminants may be removed from the antibodies by conventional techniques, such as chromatography, gel filtration, precipitation, and extraction. The polypeptides of this invention may be used in the purification process in, for example, an affinity chromatography step.

[4741] A number of therapeutically useful molecules are known in the art which comprise antigen-binding sites that are capable of exhibiting immunological binding properties of an antibody molecule. The proteolytic enzyme papain preferentially cleaves IgG molecules to yield several fragments, two of which (the “F(ab)” fragments) each comprise a covalent heterodimer that includes an intact antigen-binding site. The enzyme pepsin is able to cleave IgG molecules to provide several fragments, including the “F(ab′)₂” fragment which comprises both antigen-binding sites. An “Fv” fragment can be produced by preferential proteolytic cleavage of an IgM, and on rare occasions IgG or IgA immunoglobulin molecule. Fv fragments are, however, more commonly derived using recombinant techniques known in the art. The Fv fragment includes a non-covalent V_{H}::V_{L} heterodimer including an antigen-binding site which retains much of the antigen recognition and binding capabilities of the native antibody molecule. Inbar et al. (1972) Proc. Nat. Acad. Sci. USA 69:2659-2662; Hochman et al. (1976) Biochem 15:2706-2710; and Ehrlich et al. (1980) Biochem 19:4091-4096.

[4742] A single chain Fv (“sFv”) polypeptide is a covalently linked V_{H}::V_{L} heterodimer which is expressed from a gene fusion including V_{H}- and V_{L}-encoding genes linked by a peptide-encoding linker. Huston et al. (1988) Proc. Nat. Acad. Sci. USA 85(16):5879-5883. A number of methods have been described to discern chemical structures for converting the naturally aggregated—but chemically separated—light and heavy polypeptide chains from an antibody V region into an sFv molecule which will fold into a three dimensional structure substantially similar to the structure of an antigen-binding site. See, e.g., U.S. Pat. Nos. 5,091,513 and 5,132,405, to Huston et al.; and U.S. Pat. No. 4,946,778, to Ladner et al.

[4743] Each of the above-described molecules includes a heavy chain and a light chain CDR set, respectively interposed between a heavy chain and a light chain FR set which provide support to the CDRS and define the spatial relationship of the CDRs relative to each other. As used herein, the term “CDR set” refers to the three hypervariable regions of a heavy or light chain V region. Proceeding from the N-terminus of a heavy or light chain, these regions are denoted as “CDR1,” “CDR2,” and “CDR3” respectively. An antigen-binding site, therefore, includes six CDRs, comprising the CDR set from each of a heavy and a light chain V region. A polypeptide comprising a single CDR, (e.g., a CDR1, CDR2 or CDR3) is referred to herein as a “molecular recognition unit.” Crystallographic analysis of a number of antigen-antibody complexes has demonstrated that the amino acid residues of CDRs form extensive contact with bound antigen, wherein the most extensive antigen contact is with the heavy chain CDR3. Thus, the molecular recognition units are primarily responsible for the specificity of an antigen-binding site.

[4744] As used herein, the term “FR set” refers to the four flanking amino acid sequences which frame the CDRs of a CDR set of a heavy or light chain V region. Some FR residues may contact bound antigen; however, FRs are primarily responsible for folding the V region into the antigen-binding site, particularly the FR residues directly adjacent to the CDRS. Within FRs, certain amino residues and certain structural features are very highly conserved. In this regard, all V region sequences contain an internal disulfide loop of around 90 amino acid residues. When the V regions fold into a binding-site, the CDRs are displayed as projecting loop motifs which form an antigen-binding surface. It is generally recognized that there are conserved structural regions of FRs which influence the folded shape of the CDR loops into certain “canonical” structures—regardless of the precise CDR amino acid sequence. Further, certain FR residues are known to participate in non-covalent interdomain contacts which stabilize the interaction of the antibody heavy and light chains.

[4745] A number of “humanized” antibody molecules comprising an antigen-binding site derived from a non-human immunoglobulin have been described, including chimeric antibodies having rodent V regions and their associated CDRs fused to human constant domains (Winter et al. (1991) Nature 349:293-299; Lobuglio et al. (1989) Proc. Nat. Acad. Sci. USA 86:4220-4224; Shaw et al. (1987) J Immunol. 138:4534-4538; and Brown et al. (1987) Cancer Res. 47:3577-3583), rodent CDRs grafted into a human supporting FR prior to fusion with an appropriate human antibody constant domain (Riechmann et al. (1988) Nature 332:323-327; Verhoeyen et al. (1988) Science 239:1534-1536; and Jones et al. (1986) Nature 321:522-525), and rodent CDRs supported by recombinantly veneered rodent FRs (European Patent Publication No. 519,596, published Dec. 23, 1992). These “humanized” molecules are designed to minimize unwanted immunological response toward rodent antihuman antibody molecules which limits the duration and effectiveness of therapeutic applications of those moieties in human recipients.

[4746] As used herein, the terms “veneered FRs” and “recombinantly veneered FRs” refer to the selective replacement of FR residues from, e.g., a rodent heavy or light chain V region, with human FR residues in order to provide a xenogeneic molecule comprising an antigen-binding site which retains substantially all of the native FR polypeptide folding structure. Veneering techniques are based on the understanding that the ligand binding characteristics of an antigen-binding site are determined primarily by the structure and relative disposition of the heavy and light chain CDR sets within the antigen-binding surface. Davies et al. (1990) Ann. Rev. Biochem. 59:439-473. Thus, antigen binding specificity can be preserved in a humanized antibody only wherein the CDR structures, their interaction with each other, and their interaction with the rest of the V region domains are carefully maintained. By using veneering techniques, exterior (e.g., solvent-accessible) FR residues which are readily encountered by the immune system are selectively replaced with human residues to provide a hybrid molecule that comprises either a weakly immunogenic, or substantially non-immunogenic veneered surface.

[4747] The process of veneering makes use of the available sequence data for human antibody variable domains compiled by Kabat et al., in Sequences of Proteins of Immunological Interest, 4th ed., (U.S. Dept. of Health and Human Services, U.S. Government Printing Office, 1987), updates to the Kabat database, and other accessible U.S. and foreign databases (both nucleic acid and protein). Solvent accessibilities of V region amino acids can be deduced from the known three-dimensional structure for human and murine antibody fragments. There are two general steps in veneering a murine antigen-binding site. Initially, the FRs of the variable domains of an antibody molecule of interest are compared with corresponding FR sequences of human variable domains obtained from the above-identified sources. The most homologous human V regions are then compared residue by residue to corresponding murine amino acids. The residues in the murine FR which differ from the human counterpart are replaced by the residues present in the human moiety using recombinant techniques well known in the art. Residue switching is only carried out with moieties which are at least partially exposed (solvent accessible), and care is exercised in the replacement of amino acid residues which may have a significant effect on the tertiary structure of V region domains, such as proline, glycine and charged amino acids.

[4748] In this manner, the resultant “veneered” murine antigen-binding sites are thus designed to retain the murine CDR residues, the residues substantially adjacent to the CDRs, the residues identified as buried or mostly buried (solvent inaccessible), the residues believed to participate in non-covalent (e.g., electrostatic and hydrophobic) contacts between heavy and light chain domains, and the residues from conserved structural regions of the FRs which are believed to influence the “canonical” tertiary structures of the CDR loops. These design criteria are then used to prepare recombinant nucleotide sequences which combine the CDRs of both the heavy and light chain of a murine antigen-binding site into human-appearing FRs that can be used to transfect mammalian cells for the expression of recombinant human antibodies which exhibit the antigen specificity of the murine antibody molecule.

[4749] In another embodiment of the invention, monoclonal antibodies of the present invention may be coupled to one or more therapeutic agents. Suitable agents in this regard include radionuclides, differentiation inducers, drugs, toxins, and derivatives thereof. Preferred radionuclides include ⁹⁰Y, ¹²³I, ¹²⁵I, ¹³¹I, ¹⁸⁶Re, ¹⁸⁸Re, ²¹¹At, and ²¹²Bi. Preferred drugs include methotrexate, and pyrimidine and purine analogs. Preferred differentiation inducers include phorbol esters and butyric acid. Preferred toxins include ricin, abrin, diptheria toxin, cholera toxin, gelonin, Pseudomonas exotoxin, Shigella toxin, and pokeweed antiviral protein.

[4750] A therapeutic agent may be coupled (e.g., covalently bonded) to a suitable monoclonal antibody either directly or indirectly (e.g., via a linker group). A direct reaction between an agent and an antibody is possible when each possesses a substituent capable of reacting with the other. For example, a nucleophilic group, such as an amino or sulfhydryl group, on one may be capable of reacting with a carbonyl-containing group, such as an anhydride or an acid halide, or with an alkyl group containing a good leaving group (e.g., a halide) on the other.

[4751] Alternatively, it may be desirable to couple a therapeutic agent and an antibody via a linker group. A linker group can function as a spacer to distance an antibody from an agent in order to avoid interference with binding capabilities. A linker group can also serve to increase the chemical reactivity of a substituent on an agent or an antibody, and thus increase the coupling efficiency. An increase in chemical reactivity may also facilitate the use of agents, or functional groups on agents, which otherwise would not be possible.

[4752] It will be evident to those skilled in the art that a variety of bifunctional or polyfunctional reagents, both homo- and hetero-functional (such as those described in the catalog of the Pierce Chemical Co., Rockford, Ill.), may be employed as the linker group. Coupling may be effected, for example, through amino groups, carboxyl groups, sulfhydryl groups or oxidized carbohydrate residues. There are numerous references describing such methodology, e.g., U.S. Pat. No. 4,671,958, to Rodwell et al.

[4753] Where a therapeutic agent is more potent when free from the antibody portion of the immunoconjugates of the present invention, it may be desirable to use a linker group which is cleavable during or upon internalization into a cell. A number of different cleavable linker groups have been described. The mechanisms for the intracellular release of an agent from these linker groups include cleavage by reduction of a disulfide bond (e.g., U.S. Pat. No. 4,489,710, to Spitler), by irradiation of a photolabile bond (e.g., U.S. Pat. No. 4,625,014, to Senter et al.), by hydrolysis of derivatized amino acid side chains (e.g., U.S. Pat. No. 4,638,045, to Kohn et al.), by serum complement-mediated hydrolysis (e.g., U.S. Pat. No. 4,671,958, to Rodwell et al.), and acid-catalyzed hydrolysis (e.g., U.S. Pat. No. 4,569,789, to Blattler et al.).

[4754] It may be desirable to couple more than one agent to an antibody. In one embodiment, multiple molecules of an agent are coupled to one antibody molecule. In another embodiment, more than one type of agent may be coupled to one antibody. Regardless of the particular embodiment, immunoconjugates with more than one agent may be prepared in a variety of ways. For example, more than one agent may be coupled directly to an antibody molecule, or linkers that provide multiple sites for attachment can be used. Alternatively, a carrier can be used.

[4755] A carrier may bear the agents in a variety of ways, including covalent bonding either directly or via a linker group. Suitable carriers include proteins such as albumins (e.g., U.S. Pat. No. 4,507,234, to Kato et al.), peptides and polysaccharides such as aminodextran (e.g., U.S. Pat. No. 4,699,784, to Shih et al.). A carrier may also bear an agent by noncovalent bonding or by encapsulation, such as within a liposome vesicle (e.g., U.S. Pat. Nos. 4,429,008 and 4,873,088). Carriers specific for radionuclide agents include radiohalogenated small molecules and chelating compounds. For example, U.S. Pat. No. 4,735,792 discloses representative radiohalogenated small molecules and their synthesis. A radionuclide chelate may be formed from chelating compounds that include those containing nitrogen and sulfur atoms as the donor atoms for binding the metal, or metal oxide, radionuclide. For example, U.S. Pat. No. 4,673,562, to Davison et al. discloses representative chelating compounds and their synthesis.

[4756] T Cell Compositions

[4757] The present invention, in another aspect, provides T cells specific for a tumor polypeptide disclosed herein, or for a variant or derivative thereof. Such cells may generally be prepared in vitro or ex vivo, using standard procedures. For example, T cells may be isolated from bone marrow, peripheral blood, or a fraction of bone marrow or peripheral blood of a patient, using a commercially available cell separation system, such as the Isolex™ System, available from Nexell Therapeutics, Inc. (Irvine, Calif.; see also U.S. Pat. No. 5,240,856; U.S. Pat. No. 5,215,926; WO 89/06280; WO 91/16116 and WO 92/07243). Alternatively, T cells may be derived from related or unrelated humans, non-human mammals, cell lines or cultures.

[4758] T cells may be stimulated with a polypeptide, polynucleotide encoding a polypeptide and/or an antigen presenting cell (APC) that expresses such a polypeptide. Such stimulation is performed under conditions and for a time sufficient to permit the generation of T cells that are specific for the polypeptide of interest. Preferably, a tumor polypeptide or polynucleotide of the invention is present within a delivery vehicle, such as a microsphere, to facilitate the generation of specific T cells.

[4759] T cells are considered to be specific for a polypeptide of the present invention if the T cells specifically proliferate, secrete cytokines or kill target cells coated with the polypeptide or expressing a gene encoding the polypeptide. T cell specificity may be evaluated using any of a variety of standard techniques. For example, within a chromium release assay or proliferation assay, a stimulation index of more than two fold increase in lysis and/or proliferation, compared to negative controls, indicates T cell specificity. Such assays may be performed, for example, as described in Chen et al., Cancer Res. 54:1065-1070, 1994. Alternatively, detection of the proliferation of T cells may be accomplished by a variety of known techniques. For example, T cell proliferation can be detected by measuring an increased rate of DNA synthesis (e.g., by pulse-labeling cultures of T cells with tritiated thymidine and measuring the amount of tritiated thymidine incorporated into DNA). Contact with a tumor polypeptide (100 ng/ml-100 μg/ml, preferably 200 ng/ml-25 μg/ml) for 3-7 days will typically result in at least a two fold increase in proliferation of the T cells. Contact as described above for 2-3 hours should result in activation of the T cells, as measured using standard cytokine assays in which a two fold increase in the level of cytokine release (e.g., TNF or IFN-γ) is indicative of T cell activation (see Coligan et al., Current Protocols in Immunology, vol. 1, Wiley Interscience (Greene 1998)). T cells that have been activated in response to a tumor polypeptide, polynucleotide or polypeptide-expressing APC may be CD4⁺ and/or CD8⁺. Tumor polypeptide-specific T cells may be expanded using standard techniques. Within preferred embodiments, the T cells are derived from a patient, a related donor or an unrelated donor, and are administered to the patient following stimulation and expansion.

[4760] For therapeutic purposes, CD4⁺ or CD8⁺ T cells that proliferate in response to a tumor polypeptide, polynucleotide or APC can be expanded in number either in vitro or in vivo. Proliferation of such T cells in vitro may be accomplished in a variety of ways. For example, the T cells can be re-exposed to a tumor polypeptide, or a short peptide corresponding to an immunogenic portion of such a polypeptide, with or without the addition of T cell growth factors, such as interleukin-2, and/or stimulator cells that synthesize a tumor polypeptide. Alternatively, one or more T cells that proliferate in the presence of the tumor polypeptide can be expanded in number by cloning. Methods for cloning cells are well known in the art, and include limiting dilution.

[4761] T Cell Receptor Compositions

[4762] The T cell receptor (TCR) consists of 2 different, highly variable polypeptide chains, termed the T-cell receptor α and β chains, that are linked by a disulfide bond (Janeway, Travers, Walport. Immunobiology. Fourth Ed., 148-159. Elsevier Science Ltd/Garland Publishing. 1999). The α/β heterodimer complexes with the invariant CD3 chains at the cell membrane. This complex recognizes specific antigenic peptides bound to MHC molecules. The enormous diversity of TCR specificities is generated much like immunoglobulin diversity, through somatic gene rearrangement. The β chain genes contain over 50 variable (V), 2 diversity (D), over 10 joining (J) segments, and 2 constant region segments (C). The α chain genes contain over 70 V segments, and over 60 J segments but no D segments, as well as one C segment. During T cell development in the thymus, the D to J gene rearrangement of the β chain occurs, followed by the V gene segment rearrangement to the DJ. This functional VDJβ exon is transcribed and spliced to join to a Cβ. For the α chain, a Vα gene segment rearranges to a Jα gene segment to create the functional exon that is then transcribed and spliced to the Cα. Diversity is further increased during the recombination process by the random addition of P and N-nucleotides between the V, D, and J segments of the β chain and between the V and J segments in the □ chain (Janeway, Travers, Walport. Immunobiology. Fourth Ed., 98 and 150. Elsevier Science Ltd/Garland Publishing. 1999).

[4763] The present invention, in another aspect, provides TCRs specific for a polypeptide disclosed herein, or for a variant or derivative thereof. In accordance with the present invention, polynucleotide and amino acid sequences are provided for the V-J or V-D-J junctional regions or parts thereof for the alpha and beta chains of the T-cell receptor which recognize tumor polypeptides described herein. In general, this aspect of the invention relates to T-cell receptors which recognize or bind tumor polypeptides presented in the context of MHC. In a preferred embodiment the tumor antigens recognized by the T-cell receptors comprise a polypeptide of the present invention. For example, cDNA encoding a TCR specific for a pancreatic tumor peptide can be isolated from T cells specific for a tumor polypeptide using standard molecular biological and recombinant DNA techniques.

[4764] This invention further includes the T-cell receptors or analogs thereof having substantially the same function or activity as the T-cell receptors of this invention which recognize or bind tumor polypeptides. Such receptors include, but are not limited to, a fragment of the receptor, or a substitution, addition or deletion mutant of a T-cell receptor provided herein. This invention also encompasses polypeptides or peptides that are substantially homologous to the T-cell receptors provided herein or that retain substantially the same activity. The term “analog” includes any protein or polypeptide having an amino acid residue sequence substantially identical to the T-cell receptors provided herein in which one or more residues, preferably no more than 5 residues, more preferably no more than 25 residues have been conservatively substituted with a functionally similar residue and which displays the functional aspects of the T-cell receptor as described herein.

[4765] The present invention further provides for suitable mammalian host cells, for example, non-specific T cells, that are transfected with a polynucleotide encoding TCRs specific for a polypeptide described herein, thereby rendering the host cell specific for the polypeptide. The α and β chains of the TCR may be contained on separate expression vectors or alternatively, on a single expression vector that also contains an internal ribosome entry site (IRES) for cap-independent translation of the gene downstream of the IRES. Said host cells expressing TCRs specific for the polypeptide may be used, for example, for adoptive immunotherapy of pancreatic cancer as discussed further below.

[4766] In further aspects of the present invention, cloned TCRs specific for a polypeptide recited herein may be used in a kit for the diagnosis of pancreatic cancer. For example, the nucleic acid sequence or portions thereof, of tumor-specific TCRs can be used as probes or primers for the detection of expression of the rearranged genes encoding the specific TCR in a biological sample. Therefore, the present invention further provides for an assay for detecting messenger RNA or DNA encoding the TCR specific for a polypeptide.

[4767] Pharmaceutical Compositions

[4768] In additional embodiments, the present invention concerns formulation of one or more of the polynucleotide, polypeptide, T-cell, TCR, and/or antibody compositions disclosed herein in pharmaceutically-acceptable carriers for administration to a cell or an animal, either alone, or in combination with one or more other modalities of therapy.

[4769] It will be understood that, if desired, a composition as disclosed herein may be administered in combination with other agents as well, such as, e.g., other proteins or polypeptides or various pharmaceutically-active agents. In fact, there is virtually no limit to other components that may also be included, given that the additional agents do not cause a significant adverse effect upon contact with the target cells or host tissues. The compositions may thus be delivered along with various other agents as required in the particular instance. Such compositions may be purified from host cells or other biological sources, or alternatively may be chemically synthesized as described herein. Likewise, such compositions may further comprise substituted or derivatized RNA or DNA compositions.

[4770] Therefore, in another aspect of the present invention, pharmaceutical compositions are provided comprising one or more of the polynucleotide, polypeptide, antibody,TCR, and/or T-cell compositions described herein in combination with a physiologically acceptable carrier. In certain preferred embodiments, the pharmaceutical compositions of the invention comprise immunogenic polynucleotide and/or polypeptide compositions of the invention for use in prophylactic and theraputic vaccine applications. Vaccine preparation is generally described in, for example, M. F. Powell and M. J. Newman, eds., “Vaccine Design (the subunit and adjuvant approach),” Plenum Press (NY, 1995). Generally, such compositions will comprise one or more polynucleotide and/or polypeptide compositions of the present invention in combination with one or more immunostimulants.

[4771] It will be apparent that any of the pharmaceutical compositions described herein can contain pharmaceutically acceptable salts of the polynucleotides and polypeptides of the invention. Such salts can be prepared, for example, from pharmaceutically acceptable non-toxic bases, including organic bases (e.g., salts of primary, secondary and tertiary amines and basic amino acids) and inorganic bases (e.g., sodium, potassium, lithium, ammonium, calcium and magnesium salts).

[4772] In another embodiment, illustrative immunogenic compositions, e.g., vaccine compositions, of the present invention comprise DNA encoding one or more of the polypeptides as described above, such that the polypeptide is generated in situ. As noted above, the polynucleotide may be administered within any of a variety of delivery systems known to those of ordinary skill in the art. Indeed, numerous gene delivery techniques are well known in the art, such as those described by Rolland, Crit. Rev. Therap. Drug Carrier Systems 15:143-198, 1998, and references cited therein. Appropriate polynucleotide expression systems will, of course, contain the necessary regulatory DNA regulatory sequences for expression in a patient (such as a suitable promoter and terminating signal). Alternatively, bacterial delivery systems may involve the administration of a bacterium (such as Bacillus-Calmette-Guerrin) that expresses an immunogenic portion of the polypeptide on its cell surface or secretes such an epitope.

[4773] Therefore, in certain embodiments, polynucleotides encoding immunogenic polypeptides described herein are introduced into suitable mammalian host cells for expression using any of a number of known viral-based systems. In one illustrative embodiment, retroviruses provide a convenient and effective platform for gene delivery systems. A selected nucleotide sequence encoding a polypeptide of the present invention can be inserted into a vector and packaged in retroviral particles using techniques known in the art. The recombinant virus can then be isolated and delivered to a subject. A number of illustrative retroviral systems have been described (e.g., U.S. Pat. No. 5,219,740; Miller and Rosman (1989) BioTechniques 7:980-990; Miller, A. D. (1990) Human Gene Therapy 1:5-14; Scarpa et al. (1991) Virology 180:849-852; Burns et al. (1993) Proc. Natl. Acad. Sci. USA 90:8033-8037; and Boris-Lawrie and Temin (1993) Cur. Opin. Genet. Develop. 3:102-109.

[4774] In addition, a number of illustrative adenovirus-based systems have also been described. Unlike retroviruses which integrate into the host genome, adenoviruses persist extrachromosomally thus minimizing the risks associated with insertional mutagenesis (Haj-Ahmad and Graham (1986) J. Virol. 57:267-274; Bett et al. (1993) J. Virol. 67:5911-5921; Mittereder et al. (1994) Human Gene Therapy 5:717-729; Seth et al. (1994) J. Virol. 68:933-940; Barr et al. (1994) Gene Therapy 1:51-58; Berkner, K. L. (1988) BioTechniques 6:616-629; and Rich et al. (1993) Human Gene Therapy 4:461-476).

[4775] Various adeno-associated virus (AAV) vector systems have also been developed for polynucleotide delivery. AAV vectors can be readily constructed using techniques well known in the art. See, e.g., U.S. Pat. Nos. 5,173,414 and 5,139,941; International Publication Nos. WO 92/01070 and WO 93/03769; Lebkowski et al. (1988) Molec. Cell. Biol. 8:3988-3996; Vincent et al. (1990) Vaccines 90 (Cold Spring Harbor Laboratory Press); Carter, B. J. (1992) Current Opinion in Biotechnology 3:533-539; Muzyczka, N. (1992) Current Topics in Microbiol. and Immunol. 158:97-129; Kotin, R. M. (1994) Human Gene Therapy 5:793-801; Shelling and Smith (1994) Gene Therapy 1:165-169; and Zhou et al. (1994) J. Exp. Med. 179:1867-1875.

[4776] Additional viral vectors useful for delivering the polynucleotides encoding polypeptides of the present invention by gene transfer include those derived from the pox family of viruses, such as vaccinia virus and avian poxvirus. By way of example, vaccinia virus recombinants expressing the novel molecules can be constructed as follows. The DNA encoding a polypeptide is first inserted into an appropriate vector so that it is adjacent to a vaccinia promoter and flanking vaccinia DNA sequences, such as the sequence encoding thymidine kinase (TK). This vector is then used to transfect cells which are simultaneously infected with vaccinia. Homologous recombination serves to insert the vaccinia promoter plus the gene encoding the polypeptide of interest into the viral genome. The resulting TK.sup.(-) recombinant can be selected by culturing the cells in the presence of 5-bromodeoxyuridine and picking viral plaques resistant thereto.

[4777] A vaccinia-based infection/transfection system can be conveniently used to provide for inducible, transient expression or coexpression of one or more polypeptides described herein in host cells of an organism. In this particular system, cells are first infected in vitro with a vaccinia virus recombinant that encodes the bacteriophage T7 RNA polymerase. This polymerase displays exquisite specificity in that it only transcribes templates bearing T7 promoters. Following infection, cells are transfected with the polynucleotide or polynucleotides of interest, driven by a T7 promoter. The polymerase expressed in the cytoplasm from the vaccinia virus recombinant transcribes the transfected DNA into RNA which is then translated into polypeptide by the host translational machinery. The method provides for high level, transient, cytoplasmic production of large quantities of RNA and its translation products. See, e.g., Elroy-Stein and Moss, Proc. Natl. Acad. Sci. USA (1990) 87:6743-6747; Fuerst et al. Proc. Natl. Acad. Sci. USA (1986) 83:8122-8126.

[4778] Alternatively, avipoxviruses, such as the fowlpox and canarypox viruses, can also be used to deliver the coding sequences of interest. Recombinant avipox viruses, expressing immunogens from mammalian pathogens, are known to confer protective immunity when administered to non-avian species. The use of an Avipox vector is particularly desirable in human and other mammalian species since members of the Avipox genus can only productively replicate in susceptible avian species and therefore are not infective in mammalian cells. Methods for producing recombinant Avipoxviruses are known in the art and employ genetic recombination, as described above with respect to the production of vaccinia viruses. See, e.g., WO 91/12882; WO 89/03429; and WO 92/03545.

[4779] Any of a number of alphavirus vectors can also be used for delivery of polynucleotide compositions of the present invention, such as those vectors described in U.S. Pat. Nos. 5,843,723; 6,015,686; 6,008,035 and 6,015,694. Certain vectors based on Venezuelan Equine Encephalitis (VEE) can also be used, illustrative examples of which can be found in U.S. Pat. Nos. 5,505,947 and 5,643,576.

[4780] Moreover, molecular conjugate vectors, such as the adenovirus chimeric vectors described in Michael et al. J. Biol. Chem. (1993) 268:6866-6869 and Wagner et al. Proc. Natl. Acad. Sci. USA (1992) 89:6099-6103, can also be used for gene delivery under the invention.

[4781] Additional illustrative information on these and other known viral-based delivery systems can be found, for example, in Fisher-Hoch et al., Proc. Natl. Acad. Sci. USA 86:317-321, 1989; Flexner et al., Ann. N.Y. Acad. Sci. 569:86-103, 1989; Flexner et al., Vaccine 8:17-21, 1990; U.S. Pat. Nos. 4,603,112, 4,769,330, and 5,017,487; WO 89/01973; U.S. Pat. No. 4,777,127; GB 2,200,651; EP 0,345,242; WO 91/02805; Berkner, Biotechniques 6:616-627, 1988; Rosenfeld et al., Science 252:431-434, 1991; Kolls et al., Proc. Natl. Acad. Sci. USA 91:215-219, 1994; Kass-Eisler et al., Proc. Natl. Acad Sci. USA 90:11498-11502, 1993; Guzman et al., Circulation 88:2838-2848, 1993; and Guzman et al., Cir. Res. 73:1202-1207, 1993.

[4782] In certain embodiments, a polynucleotide may be integrated into the genome of a target cell. This integration may be in the specific location and orientation via homologous recombination (gene replacement) or it may be integrated in a random, non-specific location (gene augmentation). In yet further embodiments, the polynucleotide may be stably maintained in the cell as a separate, episomal segment of DNA. Such polynucleotide segments or “episomes” encode sequences sufficient to permit maintenance and replication independent of or in synchronization with the host cell cycle. The manner in which the expression construct is delivered to a cell and where in the cell the polynucleotide remains is dependent on the type of expression construct employed.

[4783] In another embodiment of the invention, a polynucleotide is administered/delivered as “naked” DNA, for example as described in Ulmer et al., Science 259:1745-1749, 1993 and reviewed by Cohen, Science 259:1691-1692, 1993. The uptake of naked DNA may be increased by coating the DNA onto biodegradable beads, which are efficiently transported into the cells.

[4784] In still another embodiment, a composition of the present invention can be delivered via a particle bombardment approach, many of which have been described. In one illustrative example, gas-driven particle acceleration can be achieved with devices such as those manufactured by Powderject Pharmaceuticals PLC (Oxford, UK) and Powderject Vaccines Inc. (Madison, Wis.), some examples of which are described in U.S. Pat. Nos. 5,846,796; 6,010,478; 5,865,796; 5,584,807; and EP Patent No. 0500799. This approach offers a needle-free delivery approach wherein a dry powder formulation of microscopic particles, such as polynucleotide or polypeptide particles, are accelerated to high speed within a helium gas jet generated by a hand held device, propelling the particles into a target tissue of interest.

[4785] In a related embodiment, other devices and methods that may be useful for gas-driven needle-less injection of compositions of the present invention include those provided by Bioject, Inc. (Portland, Oreg.), some examples of which are described in U.S. Pat. Nos. 4,790,824; 5,064,413; 5,312,335; 5,383,851; 5,399,163; 5,520,639 and 5,993,412.

[4786] According to another embodiment, the pharmaceutical compositions described herein will comprise one or more immunostimulants in addition to the immunogenic polynucleotide, polypeptide, antibody, T-cell, TCR, and/or APC compositions of this invention. An immunostimulant refers to essentially any substance that enhances or potentiates an immune response (antibody and/or cell-mediated) to an exogenous antigen. One preferred type of immunostimulant comprises an adjuvant. Many adjuvants contain a substance designed to protect the antigen from rapid catabolism, such as aluminum hydroxide or mineral oil, and a stimulator of immune responses, such as lipidA, Bortadella pertussis or Mycobacterium tuberculosis derived proteins. Certain adjuvants are commercially available as, for example, Freund's Incomplete Adjuvant and Complete Adjuvant (Difco Laboratories, Detroit, Mich.); Merck Adjuvant 65 (Merck and Company, Inc., Rahway, N.J.); AS-2 (SmithKline Beecham, Philadelphia, Pa.); aluminum salts such as aluminum hydroxide gel (alum) or aluminum phosphate; salts of calcium, iron or zinc; an insoluble suspension of acylated tyrosine; acylated sugars; cationically or anionically derivatized polysaccharides; polyphosphazenes; biodegradable microspheres; monophosphoryl lipid A and quil A. Cytokines, such as GM-CSF, interleukin-2, -7, -12, and other like growth factors, may also be used as adjuvants.

[4787] Within certain embodiments of the invention, the adjuvant composition is preferably one that induces an immune response predominantly of the Th1 type. High levels of Th1-type cytokines (e.g, IFN-γ, TNFα, IL-2 and IL-12) tend to favor the induction of cell mediated immune responses to an administered antigen. In contrast, high levels of Th2-type cytokines (e.g., IL-4, IL-5, IL-6 and IL-10) tend to favor the induction of humoral immune responses. Following application of a vaccine as provided herein, a patient will support an immune response that includes Th1- and Th2-type responses. Within a preferred embodiment, in which a response is predominantly Th1-type, the level of Th1-type cytokines will increase to a greater extent than the level of Th2-type cytokines. The levels of these cytokines may be readily assessed using standard assays. For a review of the families of cytokines, see Mosmann and Coffman, Ann. Rev. Immunol. 7:145-173, 1989.

[4788] Certain preferred adjuvants for eliciting a predominantly Th1-type response include, for example, a combination of monophosphoryl lipid A, preferably 3-de-O-acylated monophosphoryl lipid A, together with an aluminum salt. MPL® adjuvants are available from Corixa Corporation (Seattle, Wash.; see, for example, U.S. Pat. Nos. 4,436,727; 4,877,611; 4,866,034 and 4,912,094). CpG-containing oligonucleotides (in which the CpG dinucleotide is unmethylated) also induce a predominantly Th1 response. Such oligonucleotides are well known and are described, for example, in WO 96/02555, WO 99/33488 and U.S. Pat. Nos. 6,008,200 and 5,856,462. Immunostimulatory DNA sequences are also described, for example, by Sato et al., Science 273:352, 1996. Another preferred adjuvant comprises a saponin, such as Quil A, or derivatives thereof, including QS21 and QS7 (Aquila Biopharmaceuticals Inc., Framingham, Mass.); Escin; Digitonin; or Gypsophila or Chenopodium quinoa saponins. Other preferred formulations include more than one saponin in the adjuvant combinations of the present invention, for example combinations of at least two of the following group comprising QS21, QS7, Quil A, β-escin, or digitonin.

[4789] Alternatively the saponin formulations may be combined with vaccine vehicles composed of chitosan or other polycationic polymers, polylactide and polylactide-co-glycolide particles, poly-N-acetyl glucosamine-based polymer matrix, particles composed of polysaccharides or chemically modified polysaccharides, liposomes and lipid-based particles, particles composed of glycerol monoesters, etc. The saponins may also be formulated in the presence of cholesterol to form particulate structures such as liposomes or ISCOMs. Furthermore, the saponins may be formulated together with a polyoxyethylene ether or ester, in either a non-particulate solution or suspension, or in a particulate structure such as a paucilamelar liposome or ISCOM. The saponins may also be formulated with excipients such as Carbopol^{R} to increase viscosity, or may be formulated in a dry powder form with a powder excipient such as lactose.

[4790] In one preferred embodiment, the adjuvant system includes the combination of a monophosphoryl lipid A and a saponin derivative, such as the combination of QS21 and 3D-MPL® adjuvant, as described in WO 94/00153, or a less reactogenic composition where the QS21 is quenched with cholesterol, as described in WO 96/33739. Other preferred formulations comprise an oil-in-water emulsion and tocopherol. Another particularly preferred adjuvant formulation employing QS21, 3D-MPL® adjuvant and tocopherol in an oil-in-water emulsion is described in WO 95/17210.

[4791] Another enhanced adjuvant system involves the combination of a CpG-containing oligonucleotide and a saponin derivative particularly the combination of CpG and QS21 is disclosed in WO 00/09159. Preferably the formulation additionally comprises an oil in water emulsion and tocopherol.

[4792] Additional illustrative adjuvants for use in the pharmaceutical compositions of the invention include Montanide ISA 720 (Seppic, France), SAF (Chiron, Calif., United States), ISCOMS (CSL), MF-59 (Chiron), the SBAS series of adjuvants (e.g., SBAS-2 or SBAS-4, available from SmithKline Beecham, Rixensart, Belgium), Detox (Enhanzyn®) (Corixa, Hamilton, Mont.), RC-529 (Corixa, Hamilton, Mont.) and other aminoalkyl glucosaminide 4-phosphates (AGPs), such as those described in pending U.S. patent application Ser. Nos. 08/853,826 and 09/074,720, the disclosures of which are incorporated herein by reference in their entireties, and polyoxyethylene ether adjuvants such as those described in WO 99/52549A1.

[4793] Other preferred adjuvants include adjuvant molecules of the general formula

HO(CH₂CH₂O)ₙ—A—R, (1)

[4794] wherein, n is 1-50, A is a bond or —C(O)—, R is C₁₅₀ alkyl or Phenyl C₁₋₅₀ alkyl.

[4795] One embodiment of the present invention consists of a vaccine formulation comprising a polyoxyethylene ether of general formula (I), wherein n is between 1 and 50, preferably 4-24, most preferably 9; the R component is C₁₋₅₀, preferably C₄-C₂₀ alkyl and most preferably C₁₂ alkyl, and A is a bond. The concentration of the polyoxyethylene ethers should be in the range 0.1-20%, preferably from 0.1-10%, and most preferably in the range 0.1-1%. Preferred polyoxyethylene ethers are selected from the following group: polyoxyethylene-9-lauryl ether, polyoxyethylene-9-steoryl ether, polyoxyethylene-8-steoryl ether, polyoxyethylene-4-lauryl ether, polyoxyethylene-35-lauryl ether, and polyoxyethylene-23-lauryl ether. Polyoxyethylene ethers such as polyoxyethylene lauryl ether are described in the Merck index (₁₂th edition: entry 7717). These adjuvant molecules are described in WO 99/52549.

[4796] The polyoxyethylene ether according to the general formula (I) above may, if desired, be combined with another adjuvant. For example, a preferred adjuvant combination is preferably with CpG as described in the pending UK patent application GB 9820956.2.

[4797] According to another embodiment of this invention, an immunogenic composition described herein is delivered to a host via antigen presenting cells (APCs), such as dendritic cells, macrophages, B cells, monocytes and other cells that may be engineered to be efficient APCs. Such cells may, but need not, be genetically modified to increase the capacity for presenting the antigen, to improve activation and/or maintenance of the T cell response, to have anti-tumor effects per se and/or to be immunologically compatible with the receiver (i.e., matched HLA haplotype). APCs may generally be isolated from any of a variety of biological fluids and organs, including tumor and peritumoral tissues, and may be autologous, allogeneic, syngeneic or xenogeneic cells.

[4798] Certain preferred embodiments of the present invention use dendritic cells or progenitors thereof as antigen-presenting cells. Dendritic cells are highly potent APCs (Banchereau and Steinman, Nature 392:245-251, 1998) and have been shown to be effective as a physiological adjuvant for eliciting prophylactic or therapeutic antitumor immunity (see Timmerman and Levy, Ann. Rev. Med. 50:507-529, 1999). In general, dendritic cells may be identified based on their typical shape (stellate in situ, with marked cytoplasmic processes (dendrites) visible in vitro), their ability to take up, process and present antigens with high efficiency and their ability to activate naive T cell responses. Dendritic cells may, of course, be engineered to express specific cell-surface receptors or ligands that are not commonly found on dendritic cells in vivo or ex vivo, and such modified dendritic cells are contemplated by the present invention. As an alternative to dendritic cells, secreted vesicles antigen-loaded dendritic cells (called exosomes) may be used within a vaccine (see Zitvogel et al., Nature Med. 4:594-600, 1998).

[4799] Dendritic cells and progenitors may be obtained from peripheral blood, bone marrow, tumor-infiltrating cells, peritumoral tissues-infiltrating cells, lymph nodes, spleen, skin, umbilical cord blood or any other suitable tissue or fluid. For example, dendritic cells may be differentiated ex vivo by adding a combination of cytokines such as GM-CSF, IL-4, IL-13 and/or TNFα to cultures of monocytes harvested from peripheral blood. Alternatively, CD34 positive cells harvested from peripheral blood, umbilical cord blood or bone marrow may be differentiated into dendritic cells by adding to the culture medium combinations of GM-CSF, IL-3, TNFα, CD40 ligand, LPS, flt3 ligand and/or other compound(s) that induce differentiation, maturation and proliferation of dendritic cells.

[4800] Dendritic cells are conveniently categorized as “immature” and “mature” cells, which allows a simple way to discriminate between two well characterized phenotypes. However, this nomenclature should not be construed to exclude all possible intermediate stages of differentiation. Immature dendritic cells are characterized as APC with a high capacity for antigen uptake and processing, which correlates with the high expression of Fcγ receptor and mannose receptor. The mature phenotype is typically characterized by a lower expression of these markers, but a high expression of cell surface molecules responsible for T cell activation such as class I and class II MHC, adhesion molecules (e.g., CD54 and CD11) and costimulatory molecules (e.g., CD40, CD80, CD86 and 4-1BB).

[4801] APCs may generally be transfected with a polynucleotide of the invention (or portion or other variant thereof) such that the encoded polypeptide, or an immunogenic portion thereof, is expressed on the cell surface. Such transfection may take place ex vivo, and a pharmaceutical composition comprising such transfected cells may then be used for therapeutic purposes, as described herein. Alternatively, a gene delivery vehicle that targets a dendritic or other antigen presenting cell may be administered to a patient, resulting in transfection that occurs in vivo. In vivo and ex vivo transfection of dendritic cells, for example, may generally be performed using any methods known in the art, such as those described in WO 97/24447, or the gene gun approach described by Mahvi et al., Immunology and cell Biology 75:456-460, 1997. Antigen loading of dendritic cells may be achieved by incubating dendritic cells or progenitor cells with the tumor polypeptide, DNA (naked or within a plasmid vector) or RNA; or with antigen-expressing recombinant bacterium or viruses (e.g., vaccinia, fowlpox, adenovirus or lentivirus vectors). Prior to loading, the polypeptide may be covalently conjugated to an immunological partner that provides T cell help (e.g., a carrier molecule). Alternatively, a dendritic cell may be pulsed with a non-conjugated immunological partner, separately or in the presence of the polypeptide.

[4802] While any suitable carrier known to those of ordinary skill in the art may be employed in the pharmaceutical compositions of this invention, the type of carrier will typically vary depending on the mode of administration. Compositions of the present invention may be formulated for any appropriate manner of administration, including for example, topical, oral, nasal, mucosal, intravenous, intracranial, intraperitoneal, subcutaneous and intramuscular administration.

[4803] Carriers for use within such pharmaceutical compositions are biocompatible, and may also be biodegradable. In certain embodiments, the formulation preferably provides a relatively constant level of active component release. In other embodiments, however, a more rapid rate of release immediately upon administration may be desired. The formulation of such compositions is well within the level of ordinary skill in the art using known techniques. Illustrative carriers useful in this regard include microparticles of poly(lactide-co-glycolide), polyacrylate, latex, starch, cellulose, dextran and the like. Other illustrative delayed-release carriers include supramolecular biovectors, which comprise a non-liquid hydrophilic core (e.g., a cross-linked polysaccharide or oligosaccharide) and, optionally, an external layer comprising an amphiphilic compound, such as a phospholipid (see e.g., U.S. Pat. No. 5,151,254 and PCT applications WO 94/20078, WO/94/23701 and WO 96/06638). The amount of active compound contained within a sustained release formulation depends upon the site of implantation, the rate and expected duration of release and the nature of the condition to be treated or prevented.

[4804] In another illustrative embodiment, biodegradable microspheres (e.g., polylactate polyglycolate) are employed as carriers for the compositions of this invention. Suitable biodegradable microspheres are disclosed, for example, in U.S. Pat. Nos. 4,897,268; 5,075,109; 5,928,647; 5,811,128; 5,820,883; 5,853,763; 5,814,344, 5,407,609 and 5,942,252. Modified hepatitis B core protein carrier systems. such as described in WO/99 40934, and references cited therein, will also be useful for many applications. Another illustrative carrier/delivery system employs a carrier comprising particulate-protein complexes, such as those described in U.S. Pat. No. 5,928,647, which are capable of inducing a class I-restricted cytotoxic T lymphocyte responses in a host.

[4805] In another illustrative embodiment, calcium phosphate core particles are employed as carriers, vaccine adjuvants, or as controlled release matrices for the compositions of this invention. Exemplary calcium phosphate particles are disclosed, for example, in published patent application No. WO/0046147.

[4806] The pharmaceutical compositions of the invention will often further comprise one or more buffers (e.g., neutral buffered saline or phosphate buffered saline), carbohydrates (e.g., glucose, mannose, sucrose or dextrans), mannitol, proteins, polypeptides or amino acids such as glycine, antioxidants, bacteriostats, chelating agents such as EDTA or glutathione, adjuvants (e.g., aluminum hydroxide), solutes that render the formulation isotonic, hypotonic or weakly hypertonic with the blood of a recipient, suspending agents, thickening agents and/or preservatives. Alternatively, compositions of the present invention may be formulated as a lyophilizate.

[4807] The pharmaceutical compositions described herein may be presented in unit-dose or multi-dose containers, such as sealed ampoules or vials. Such containers are typically sealed in such a way to preserve the sterility and stability of the formulation until use. In general, formulations may be stored as suspensions, solutions or emulsions in oily or aqueous vehicles. Alternatively, a pharmaceutical composition may be stored in a freeze-dried condition requiring only the addition of a sterile liquid carrier immediately prior to use.

[4808] The development of suitable dosing and treatment regimens for using the particular compositions described herein in a variety of treatment regimens, including e.g., oral, parenteral, intravenous, intranasal, and intramuscular administration and formulation, is well known in the art, some of which are briefly discussed below for general purposes of illustration.

[4809] In certain applications, the pharmaceutical compositions disclosed herein may be delivered via oral administration to an animal. As such, these compositions may be formulated with an inert diluent or with an assimilable edible carrier, or they may be enclosed in hard- or soft-shell gelatin capsule, or they may be compressed into tablets, or they may be incorporated directly with the food of the diet.

[4810] The active compounds may even be incorporated with excipients and used in the form of ingestible tablets, buccal tables, troches, capsules, elixirs, suspensions, syrups, wafers, and the like (see, for example, Mathiowitz et al., Nature 1997 Mar 27;386(6623):410-4; Hwang et al., Crit Rev Ther Drug Carrier Syst 1998;15(3):243-84; U.S. Pat. No. 5,641,515; U.S. Pat. No. 5,580,579 and U.S. Pat. No. 5,792,451). Tablets, troches, pills, capsules and the like may also contain any of a variety of additional components, for example, a binder, such as gum tragacanth, acacia, cornstarch, or gelatin; excipients, such as dicalcium phosphate; a disintegrating agent, such as corn starch, potato starch, alginic acid and the like; a lubricant, such as magnesium stearate; and a sweetening agent, such as sucrose, lactose or saccharin may be added or a flavoring agent, such as peppermint, oil of wintergreen, or cherry flavoring. When the dosage unit form is a capsule, it may contain, in addition to materials of the above type, a liquid carrier. Various other materials may be present as coatings or to otherwise modify the physical form of the dosage unit. For instance, tablets, pills, or capsules may be coated with shellac, sugar, or both. Of course, any material used in preparing any dosage unit form should be pharmaceutically pure and substantially non-toxic in the amounts employed. In addition, the active compounds may be incorporated into sustained-release preparation and formulations.

[4811] Typically, these formulations will contain at least about 0.1% of the active compound or more, although the percentage of the active ingredient(s) may, of course, be varied and may conveniently be between about 1 or 2% and about 60% or 70% or more of the weight or volume of the total formulation. Naturally, the amount of active compound(s) in each therapeutically useful composition may be prepared is such a way that a suitable dosage will be obtained in any given unit dose of the compound. Factors such as solubility, bioavailability, biological half-life, route of administration, product shelf life, as well as other pharmacological considerations will be contemplated by one skilled in the art of preparing such pharmaceutical formulations, and as such, a variety of dosages and treatment regimens may be desirable.

[4812] For oral administration the compositions of the present invention may alternatively be incorporated with one or more excipients in the form of a mouthwash, dentifrice, buccal tablet, oral spray, or sublingual orally-administered formulation. Alternatively, the active ingredient may be incorporated into an oral solution such as one containing sodium borate, glycerin and potassium bicarbonate, or dispersed in a dentifrice, or added in a therapeutically-effective amount to a composition that may include water, binders, abrasives, flavoring agents, foaming agents, and humectants. Alternatively the compositions may be fashioned into a tablet or solution form that may be placed under the tongue or otherwise dissolved in the mouth.

[4813] In certain circumstances it will be desirable to deliver the pharmaceutical compositions disclosed herein parenterally, intravenously, intramuscularly, or even intraperitoneally. Such approaches are well known to the skilled artisan, some of which are further described, for example, in U.S. Pat. No. 5,543,158; U.S. Pat. No. 5,641,515 and U.S. Pat. No. 5,399,363. In certain embodiments, solutions of the active compounds as free base or pharmacologically acceptable salts may be prepared in water suitably mixed with a surfactant, such as hydroxypropylcellulose. Dispersions may also be prepared in glycerol, liquid polyethylene glycols, and mixtures thereof and in oils. Under ordinary conditions of storage and use, these preparations generally will contain a preservative to prevent the growth of microorganisms.

[4814] Illustrative pharmaceutical forms suitable for injectable use include sterile aqueous solutions or dispersions and sterile powders for the extemporaneous preparation of sterile injectable solutions or dispersions (for example, see U.S. Pat. No. 5,466,468). In all cases the form must be sterile and must be fluid to the extent that easy syringability exists. It must be stable under the conditions of manufacture and storage and must be preserved against the contaminating action of microorganisms, such as bacteria and fungi. The carrier can be a solvent or dispersion medium containing, for example, water, ethanol, polyol (e.g., glycerol, propylene glycol, and liquid polyethylene glycol, and the like), suitable mixtures thereof, and/or vegetable oils. Proper fluidity may be maintained, for example, by the use of a coating, such as lecithin, by the maintenance of the required particle size in the case of dispersion and/or by the use of surfactants. The prevention of the action of microorganisms can be facilitated by various antibacterial and antifungal agents, for example, parabens, chlorobutanol, phenol, sorbic acid, thimerosal, and the like. In many cases, it will be preferable to include isotonic agents, for example, sugars or sodium chloride. Prolonged absorption of the injectable compositions can be brought about by the use in the compositions of agents delaying absorption, for example, aluminum monostearate and gelatin.

[4815] In one embodiment, for parenteral administration in an aqueous solution, the solution should be suitably buffered if necessary and the liquid diluent first rendered isotonic with sufficient saline or glucose. These particular aqueous solutions are especially suitable for intravenous, intramuscular, subcutaneous and intraperitoneal administration. In this connection, a sterile aqueous medium that can be employed will be known to those of skill in the art in light of the present disclosure. For example, one dosage may be dissolved in 1 ml of isotonic NaCl solution and either added to 1000 ml of hypodermoclysis fluid or injected at the proposed site of infusion, (see for example, “Remington's Pharmaceutical Sciences” 15th Edition, pages 1035-1038 and 1570-1580). Some variation in dosage will necessarily occur depending on the condition of the subject being treated. Moreover, for human administration, preparations will of course preferably meet sterility, pyrogenicity, and the general safety and purity standards as required by FDA Office of Biologics standards.

[4816] In another embodiment of the invention, the compositions disclosed herein may be formulated in a neutral or salt form. Illustrative pharmaceutically-acceptable salts include the acid addition salts (formed with the free amino groups of the protein) and which are formed with inorganic acids such as, for example, hydrochloric or phosphoric acids, or such organic acids as acetic, oxalic, tartaric, mandelic, and the like. Salts formed with the free carboxyl groups can also be derived from inorganic bases such as, for example, sodium, potassium, ammonium, calcium, or ferric hydroxides, and such organic bases as isopropylamine, trimethylamine, histidine, procaine and the like. Upon formulation, solutions will be administered in a manner compatible with the dosage formulation and in such amount as is therapeutically effective.

[4817] The carriers can further comprise any and all solvents, dispersion media, vehicles, coatings, diluents, antibacterial and antifungal agents, isotonic and absorption delaying agents, buffers, carrier solutions, suspensions, colloids, and the like. The use of such media and agents for pharmaceutical active substances is well known in the art. Except insofar as any conventional media or agent is incompatible with the active ingredient, its use in the therapeutic compositions is contemplated. Supplementary active ingredients can also be incorporated into the compositions. The phrase “pharmaceutically-acceptable” refers to molecular entities and compositions that do not produce an allergic or similar untoward reaction when administered to a human.

[4818] In certain embodiments, the pharmaceutical compositions may be delivered by intranasal sprays, inhalation, and/or other aerosol delivery vehicles. Methods for delivering genes, nucleic acids, and peptide compositions directly to the lungs via nasal aerosol sprays has been described, e.g., in U.S. Pat. No. 5,756,353 and U.S. Pat. No. 5,804,212. Likewise, the delivery of drugs using intranasal microparticle resins (Takenaga et al., J Controlled Release 1998 Mar 2;52(1-2):81-7) and lysophosphatidyl-glycerol compounds (U.S. Pat. No. 5,725,871) are also well-known in the pharmaceutical arts. Likewise, illustrative transmucosal drug delivery in the form of a polytetrafluoroetheylene support matrix is described in U.S. Pat. No. 5,780,045.

[4819] In certain embodiments, liposomes, nanocapsules, microparticles, lipid particles, vesicles, and the like, are used for the introduction of the compositions of the present invention into suitable host cells/organisms. In particular, the compositions of the present invention may be formulated for delivery either encapsulated in a lipid particle, a liposome, a vesicle, a nanosphere, or a nanoparticle or the like. Alternatively, compositions of the present invention can be bound, either covalently or non-covalently, to the surface of such carrier vehicles.

[4820] The formation and use of liposome and liposome-like preparations as potential drug carriers is generally known to those of skill in the art (see for example, Lasic, Trends Biotechnol 1998 Jul;16(7):307-21; Takakura, Nippon Rinsho 1998 Mar;56(3):691-5; Chandran et al., Indian J Exp Biol. 1997 Aug;35(8):801-9; Margalit, Crit Rev Ther Drug Carrier Syst. 1995;12(2-3):233-61; U.S. Pat. No. 5,567,434; U.S. Pat. No. 5,552,157; U.S. Pat. No. 5,565,213; U.S. Pat. No. 5,738,868 and U.S. Pat. No. 5,795,587, each specifically incorporated herein by reference in its entirety).

[4821] Liposomes have been used successfully with a number of cell types that are normally difficult to transfect by other procedures, including T cell suspensions, primary hepatocyte cultures and PC 12 cells (Renneisen et al., J Biol Chem. 1990 Sep 25;265(27):16337-42; Muller et al., DNA Cell Biol. 1990 Apr;9(3):221-9). In addition, liposomes are free of the DNA length constraints that are typical of viral-based delivery systems. Liposomes have been used effectively to introduce genes, various drugs, radiotherapeutic agents, enzymes, viruses, transcription factors, allosteric effectors and the like, into a variety of cultured cell lines and animals. Furthermore, he use of liposomes does not appear to be associated with autoimmune responses or unacceptable toxicity after systemic delivery.

[4822] In certain embodiments, liposomes are formed from phospholipids that are dispersed in an aqueous medium and spontaneously form multilamellar concentric bilayer vesicles (also termed multilamellar vesicles (MLVs).

[4823] Alternatively, in other embodiments, the invention provides for pharmaceutically-acceptable nanocapsule formulations of the compositions of the present invention. Nanocapsules can generally entrap compounds in a stable and reproducible way (see, for example, Quintanar-Guerrero et al., Drug Dev Ind Pharm. 1998 Dec;24(12):1113-28). To avoid side effects due to intracellular polymeric overloading, such ultrafine particles (sized around 0.1 μm) may be designed using polymers able to be degraded in vivo. Such particles can be made as described, for example, by Couvreur et al., Crit Rev Ther Drug Carrier Syst. 1988;5(l):1-20; zur Muhlen et al., Eur J Pharm Biopharm. 1998 Mar;45(2):149-55; Zambaux et al. J Controlled Release. 1998 Jan 2;50(1-3):31-40; and U.S. Pat. No. 5,145,684.

[4824] Cancer Therapeutic Methods

[4825] Immunologic approaches to cancer therapy are based on the recognition that cancer cells can often evade the body's defenses against aberrant or foreign cells and molecules, and that these defenses might be therapeutically stimulated to regain the lost ground, e.g. pgs. 623-648 in Klein, Immunology (Wiley-Interscience, New York, 1982). Numerous recent observations that various immune effectors can directly or indirectly inhibit growth of tumors has led to renewed interest in this approach to cancer therapy, e.g. Jager, et al., Oncology 2001;60(1):1-7; Renner, et al., Ann Hematol 2000 Dec;79(12):651-9.

[4826] Four-basic cell types whose function has been associated with antitumor cell immunity and the elimination of tumor cells from the body are: i) B-lymphocytes which secrete immunoglobulins into the blood plasma for identifying and labeling the nonself invader cells; ii) monocytes which secrete the complement proteins that are responsible for lysing and processing the immunoglobulin-coated target invader cells; iii) natural killer lymphocytes having two mechanisms for the destruction of tumor cells, antibody-dependent cellular cytotoxicity and natural killing; and iv) T-lymphocytes possessing antigen-specific receptors and having the capacity to recognize a tumor cell carrying complementary marker molecules (Schreiber, H., 1989, in Fundamental Immunology (ed). W. E. Paul, pp. 923-955).

[4827] Cancer immunotherapy generally focuses on inducing humoral immune responses, cellular immune responses, or both. Moreover, it is well established that induction of CD4⁺ T helper cells is necessary in order to secondarily induce either antibodies or cytotoxic CD8+T cells. Polypeptide antigens that are selective or ideally specific for cancer cells, particularly pancreatic cancer cells, offer a powerful approach for inducing immune responses against pancreatic cancer, and are an important aspect of the present invention.

[4828] In further aspects of the present invention, the pharmaceutical compositions described herein may be used for the treatment of cancer, particularly for the immunotherapy of pancreatic cancer. Within such methods, the pharmaceutical compositions described herein are administered to a patient, typically a warm-blooded animal, preferably a human. A patient may or may not be afflicted with cancer. Accordingly, the above pharmaceutical compositions may be used to prevent the development of a cancer or to treat a patient afflicted with a cancer. Pharmaceutical compositions and vaccines may be administered either prior to or following surgical removal of primary tumors and/or treatment such as administration of radiotherapy or conventional chemotherapeutic drugs. As discussed above, administration of the pharmaceutical compositions may be by any suitable method, including administration by intravenous, intraperitoneal, intramuscular, subcutaneous, intranasal, intradermal, anal, vaginal, topical and oral routes.

[4829] Within certain embodiments, immunotherapy may be active immunotherapy, in which treatment relies on the in vivo stimulation of the endogenous host immune system to react against tumors with the administration of immune response-modifying agents (such as polypeptides and polynucleotides as provided herein).

[4830] Within other embodiments, immunotherapy may be passive immunotherapy, in which treatment involves the delivery of agents with established tumor-immune reactivity (such as effector cells or antibodies) that can directly or indirectly mediate antitumor effects and does not necessarily depend on an intact host immune system. Examples of effector cells include T cells as discussed above, T lymphocytes (such as CD8⁺ cytotoxic T lymphocytes and CD4⁺ T-helper tumor-infiltrating lymphocytes), killer cells (such as Natural Killer cells and lymphokine-activated killer cells), B cells and antigen-presenting cells (such as dendritic cells and macrophages) expressing a polypeptide provided herein. T cell receptors and antibody receptors specific for the polypeptides recited herein may be cloned, expressed and transferred into other vectors or effector cells for adoptive immunotherapy. The polypeptides provided herein may also be used to generate antibodies or anti-idiotypic antibodies (as described above and in U.S. Pat. No. 4,918,164) for passive immunotherapy.

[4831] Monoclonal antibodies may be labeled with any of a variety of labels for desired selective usages in detection, diagnostic assays or therapeutic applications (as described in U.S. Pat. Nos. 6,090,365; 6,015,542; 5,843,398; 5,595,721; and 4,708,930, hereby incorporated by reference in their entirety as if each was incorporated individually). In each case, the binding of the labelled monoclonal antibody to the determinant site of the antigen will signal detection or delivery of a particular therapeutic agent to the antigenic determinant on the non-normal cell. A further object of this invention is to provide the specific monoclonal antibody suitably labelled for achieving such desired selective usages thereof.

[4832] Effector cells may generally be obtained in sufficient quantities for adoptive immunotherapy by growth in vitro, as described herein. Culture conditions for expanding single antigen-specific effector cells to several billion in number with retention of antigen recognition in vivo are well known in the art. Such in vitro culture conditions typically use intermittent stimulation with antigen, often in the presence of cytokines (such as IL-2) and non-dividing feeder cells. As noted above, immunoreactive polypeptides as provided herein may be used to rapidly expand antigen-specific T cell cultures in order to generate a sufficient number of cells for immunotherapy. In particular, antigen-presenting cells, such as dendritic, macrophage, monocyte, fibroblast and/or B cells, may be pulsed with immunoreactive polypeptides or transfected with one or more polynucleotides using standard techniques well known in the art. For example, antigen-presenting cells can be transfected with a polynucleotide having a promoter appropriate for increasing expression in a recombinant virus or other expression system. Cultured effector cells for use in therapy must be able to grow and distribute widely, and to survive long term in vivo. Studies have shown that cultured effector cells can be induced to grow in vivo and to survive long term in substantial numbers by repeated stimulation with antigen supplemented with IL-2 (see, for example, Cheever et al., Immunological Reviews 157:177, 1997).

[4833] Alternatively, a vector expressing a polypeptide recited herein may be introduced into antigen presenting cells taken from a patient and clonally propagated ex vivo for transplant back into the same patient. Transfected cells may be reintroduced into the patient using any means known in the art, preferably in sterile form by intravenous, intracavitary, intraperitoneal or intratumor administration.

[4834] Routes and frequency of administration of the therapeutic compositions described herein, as well as dosage, will vary from individual to individual, and may be readily established using standard techniques. In general, the pharmaceutical compositions and vaccines may be administered by injection (e.g., intracutaneous, intramuscular, intravenous or subcutaneous), intranasally (e.g., by aspiration) or orally. Preferably, between 1 and 10 doses may be administered over a 52 week period. Preferably, 6 doses are administered, at intervals of 1 month, and booster vaccinations may be given periodically thereafter. Alternate protocols may be appropriate for individual patients. A suitable dose is an amount of a compound that, when administered as described above, is capable of promoting an anti-tumor immune response, and is at least 10-50% above the basal (i.e., untreated) level. Such response can be monitored by measuring the anti-tumor antibodies in a patient or by vaccine-dependent generation of cytolytic effector cells capable of killing the patient's tumor cells in vitro. Such vaccines should also be capable of causing an immune response that leads to an improved clinical outcome (e.g., more frequent remissions, complete or partial or longer disease-free survival) in vaccinated patients as compared to non-vaccinated patients. In general, for pharmaceutical compositions and vaccines comprising one or more polypeptides, the amount of each polypeptide present in a dose ranges from about 25 μg to 5 mg per kg of host. Suitable dose sizes will vary with the size of the patient, but will typically range from about 0.1 mL to about 5 mL.

[4835] In general, an appropriate dosage and treatment regimen provides the active compound(s) in an amount sufficient to provide therapeutic and/or prophylactic benefit. Such a response can be monitored by establishing an improved clinical outcome (e.g., more frequent remissions, complete or partial, or longer disease-free survival) in treated patients as compared to non-treated patients. Increases in preexisting immune responses to a tumor protein generally correlate with an improved clinical outcome. Such immune responses may generally be evaluated using standard proliferation, cytotoxicity or cytokine assays, which may be performed using samples obtained from a patient before and after treatment.

[4836] Cancer Detection and Diagnostic Compositions, Methods and Kits

[4837] In general, a cancer may be detected in a patient based on the presence of one or more pancreatic tumor proteins and/or polynucleotides encoding such proteins in a biological sample (for example, blood, sera, sputum urine and/or tumor biopsies) obtained from the patient. In other words, such proteins may be used as markers to indicate the presence or absence of a cancer such as pancreatic cancer. In addition, such proteins may be useful for the detection of other cancers. The binding agents provided herein generally permit detection of the level of antigen that binds to the agent in the biological sample. Polynucleotide primers and probes may be used to detect the level of mRNA encoding a tumor protein, which is also indicative of the presence or absence of a cancer. In general, a pancreatic tumor sequence should be present at a level that is at least two-fold, preferably three-fold, and more preferably five-fold or higher in tumor tissue than in normal tissue of the same type from which the tumor arose. Expression levels of a particular tumor sequence in tissue types different from that in which the tumor arose are irrelevant in certain diagnostic embodiments since the presence of tumor cells can be confirmed by observation of predetermined tissue differential expression levels, e.g., 2-fold, 5-fold, etc, in tumor tissue to expression levels in normal tissue of the same type.

[4838] Other differential expression patterns can be utilized advantageously for diagnostic purposes. For example, in one aspect of the invention, overexpression of a tumor sequence in tumor tissue and normal tissue of the same type, but not in other normal tissue types, e.g. PBMCs, can be exploited diagnostically. In this case, the presence of metastatic tumor cells, for example in a sample taken from the circulation or some other tissue site different from that in which the tumor arose, can be identified and/or confirmed by detecting expression of the tumor sequence in the sample, for example using RT-PCR analysis. In many instances, it will be desired to enrich for tumor cells in the sample of interest, e.g., PBMCs, using cell capture or other like techniques.

[4839] There are a variety of assay formats known to those of ordinary skill in the art for using a binding agent to detect polypeptide markers in a sample. See, e.g., Harlow and Lane, Antibodies: A Laboratory Manual, Cold Spring Harbor Laboratory, 1988. In general, the presence or absence of a cancer in a patient may be determined by (a) contacting a biological sample obtained from a patient with a binding agent; (b) detecting in the sample a level of polypeptide that binds to the binding agent; and (c) comparing the level of polypeptide with a predetermined cut-off value.

[4840] In a preferred embodiment, the assay involves the use of binding agent immobilized on a solid support to bind to and remove the polypeptide from the remainder of the sample. The bound polypeptide may then be detected using a detection reagent that contains a reporter group and specifically binds to the binding agent/polypeptide complex. Such detection reagents may comprise, for example, a binding agent that specifically binds to the polypeptide or an antibody or other agent that specifically binds to the binding agent, such as an anti-immunoglobulin, protein G, protein A or a lectin. Alternatively, a competitive assay may be utilized, in which a polypeptide is labeled with a reporter group and allowed to bind to the immobilized binding agent after incubation of the binding agent with the sample. The extent to which components of the sample inhibit the binding of the labeled polypeptide to the binding agent is indicative of the reactivity of the sample with the immobilized binding agent. Suitable polypeptides for use within such assays include full length pancreatic tumor proteins and polypeptide portions thereof to which the binding agent binds, as described above.

[4841] The solid support may be any material known to those of ordinary skill in the art to which the tumor protein may be attached. For example, the solid support may be a test well in a microtiter plate or a nitrocellulose or other suitable membrane. Alternatively, the support may be a bead or disc, such as glass, fiberglass, latex or a plastic material such as polystyrene or polyvinylchloride. The support may also be a magnetic particle or a fiber optic sensor, such as those disclosed, for example, in U.S. Pat. No. 5,359,681. The binding agent may be immobilized on the solid support using a variety of techniques known to those of skill in the art, which are amply described in the patent and scientific literature. In the context of the present invention, the term “immobilization” refers to both noncovalent association, such as adsorption, and covalent attachment (which may be a direct linkage between the agent and functional groups on the support or may be a linkage by way of a cross-linking agent). Immobilization by adsorption to a well in a microtiter plate or to a membrane is preferred. In such cases, adsorption may be achieved by contacting the binding agent, in a suitable buffer, with the solid support for a suitable amount of time. The contact time varies with temperature, but is typically between about 1 hour and about 1 day. In general, contacting a well of a plastic microtiter plate (such as polystyrene or polyvinylchloride) with an amount of binding agent ranging from about 10 ng to about 10 μg, and preferably about 100 ng to about 1 μg, is sufficient to immobilize an adequate amount of binding agent.

[4842] Covalent attachment of binding agent to a solid support may generally be achieved by first reacting the support with a bifunctional reagent that will react with both the support and a functional group, such as a hydroxyl or amino group, on the binding agent. For example, the binding agent may be covalently attached to supports having an appropriate polymer coating using benzoquinone or by condensation of an aldehyde group on the support with an amine and an active hydrogen on the binding partner (see, e.g., Pierce Immunotechnology Catalog and Handbook, 1991, at A12-A13).

[4843] In certain embodiments, the assay is a two-antibody sandwich assay. This assay may be performed by first contacting an antibody that has been immobilized on a solid support, commonly the well of a microtiter plate, with the sample, such that polypeptides within the sample are allowed to bind to the immobilized antibody. Unbound sample is then removed from the immobilized polypeptide-antibody complexes and a detection reagent (preferably a second antibody capable of binding to a different site on the polypeptide) containing a reporter group is added. The amount of detection reagent that remains bound to the solid support is then determined using a method appropriate for the specific reporter group.

[4844] More specifically, once the antibody is immobilized on the support as described above, the remaining protein binding sites on the support are typically blocked. Any suitable blocking agent known to those of ordinary skill in the art, such as bovine serum albumin or Tween 20™ (Sigma Chemical Co., St. Louis, Mo.). The immobilized antibody is then incubated with the sample, and polypeptide is allowed to bind to the antibody. The sample may be diluted with a suitable diluent, such as phosphate-buffered saline (PBS) prior to incubation. In general, an appropriate contact time (i.e., incubation time) is a period of time that is sufficient to detect the presence of polypeptide within a sample obtained from an individual with pancreatic cancer. Preferably, the contact time is sufficient to achieve a level of binding that is at least about 95% of that achieved at equilibrium between bound and unbound polypeptide. Those of ordinary skill in the art will recognize that the time necessary to achieve equilibrium may be readily determined by assaying the level of binding that occurs over a period of time. At room temperature, an incubation time of about 30 minutes is generally sufficient.

[4845] Unbound sample may then be removed by washing the solid support with an appropriate buffer, such as PBS containing 0.1% Tween 20™. The second antibody, which contains a reporter group, may then be added to the solid support. Preferred reporter groups include those groups recited above.

[4846] The detection reagent is then incubated with the immobilized antibody-polypeptide complex for an amount of time sufficient to detect the bound polypeptide. An appropriate amount of time may generally be determined by assaying the level of binding that occurs over a period of time. Unbound detection reagent is then removed and bound detection reagent is detected using the reporter group. The method employed for detecting the reporter group depends upon the nature of the reporter group. For radioactive groups, scintillation counting or autoradiographic methods are generally appropriate. Spectroscopic methods may be used to detect dyes, luminescent groups and fluorescent groups. Biotin may be detected using avidin, coupled to a different reporter group (commonly a radioactive or fluorescent group or an enzyme). Enzyme reporter groups may generally be detected by the addition of substrate (generally for a specific period of time), followed by spectroscopic or other analysis of the reaction products.

[4847] To determine the presence or absence of a cancer, such as pancreatic cancer, the signal detected from the reporter group that remains bound to the solid support is generally compared to a signal that corresponds to a predetermined cut-off value. In one preferred embodiment, the cut-off value for the detection of a cancer is the average mean signal obtained when the immobilized antibody is incubated with samples from patients without the cancer. In general, a sample generating a signal that is three standard deviations above the predetermined cut-off value is considered positive for the cancer. In an alternate preferred embodiment, the cut-off value is determined using a Receiver Operator Curve, according to the method of Sackett et al., Clinical Epidemiology: A Basic Science for Clinical Medicine, Little Brown and Co., 1985, p. 106-7. Briefly, in this embodiment, the cut-off value may be determined from a plot of pairs of true positive rates (i.e., sensitivity) and false positive rates (100%-specificity) that correspond to each possible cut-off value for the diagnostic test result. The cut-off value on the plot that is the closest to the upper left-hand corner (i.e., the value that encloses the largest area) is the most accurate cut-off value, and a sample generating a signal that is higher than the cut-off value determined by this method may be considered positive. Alternatively, the cut-off value may be shifted to the left along the plot, to minimize the false positive rate, or to the right, to minimize the false negative rate. In general, a sample generating a signal that is higher than the cut-off value determined by this method is considered positive for a cancer.

[4848] In a related embodiment, the assay is performed in a flow-through or strip test format, wherein the binding agent is immobilized on a membrane, such as nitrocellulose. In the flow-through test, polypeptides within the sample bind to the immobilized binding agent as the sample passes through the membrane. A second, labeled binding agent then binds to the binding agent-polypeptide complex as a solution containing the second binding agent flows through the membrane. The detection of bound second binding agent may then be performed as described above. In the strip test format, one end of the membrane to which binding agent is bound is immersed in a solution containing the sample. The sample migrates along the membrane through a region containing second binding agent and to the area of immobilized binding agent. Concentration of second binding agent at the area of immobilized antibody indicates the presence of a cancer. Typically, the concentration of second binding agent at that site generates a pattern, such as a line, that can be read visually. The absence of such a pattern indicates a negative result. In general, the amount of binding agent immobilized on the membrane is selected to generate a visually discernible pattern when the biological sample contains a level of polypeptide that would be sufficient to generate a positive signal in the two-antibody sandwich assay, in the format discussed above. Preferred binding agents for use in such assays are antibodies and antigen-binding fragments thereof. Preferably, the amount of antibody immobilized on the membrane ranges from about 25 ng to about 1 μg, and more preferably from about 50 ng to about 500 ng. Such tests can typically be performed with a very small amount of biological sample.

[4849] Of course, numerous other assay protocols exist that are suitable for use with the tumor proteins or binding agents of the present invention. The above descriptions are intended to be exemplary only. For example, it will be apparent to those of ordinary skill in the art that the above protocols may be readily modified to use tumor polypeptides to detect antibodies that bind to such polypeptides in a biological sample. The detection of such tumor protein specific antibodies may correlate with the presence of a cancer.

[4850] A cancer may also, or alternatively, be detected based on the presence of T cells that specifically react with a tumor protein in a biological sample. Within certain methods, a biological sample comprising CD4⁺ and/or CD8⁺ T cells isolated from a patient is incubated with a tumor polypeptide, a polynucleotide encoding such a polypeptide and/or an APC that expresses at least an immunogenic portion of such a polypeptide, and the presence or absence of specific activation of the T cells is detected. Suitable biological samples include, but are not limited to, isolated T cells. For example, T cells may be isolated from a patient by routine techniques (such as by Ficoll/Hypaque density gradient centrifugation of peripheral blood lymphocytes). T cells may be incubated in vitro for 2-9 days (typically 4 days) at 37° C. with polypeptide (e.g., 5-25 μg/ml). It may be desirable to incubate another aliquot of a T cell sample in the absence of tumor polypeptide to serve as a control. For CD4⁺ T cells, activation is preferably detected by evaluating proliferation of the T cells. For CD8⁺ T cells, activation is preferably detected by evaluating cytolytic activity. A level of proliferation that is at least two fold greater and/or a level of cytolytic activity that is at least 20% greater than in disease-free patients indicates the presence of a cancer in the patient.

[4851] As noted above, a cancer may also, or alternatively, be detected based on the level of mRNA encoding a tumor protein in a biological sample. For example, at least two oligonucleotide primers may be employed in a polymerase chain reaction (PCR) based assay to amplify a portion of a tumor cDNA derived from a biological sample, wherein at least one of the oligonucleotide primers is specific for (i.e., hybridizes to) a polynucleotide encoding the tumor protein. The amplified cDNA is then separated and detected using techniques well known in the art, such as gel electrophoresis. Similarly, oligonucleotide probes that specifically hybridize to a polynucleotide encoding a tumor protein may be used in a hybridization assay to detect the presence of polynucleotide encoding the tumor protein in a biological sample.

[4852] To permit hybridization under assay conditions, oligonucleotide primers and probes should comprise an oligonucleotide sequence that has at least about 60%, preferably at least about 75% and more preferably at least about 90%, identity to a portion of a polynucleotide encoding a tumor protein of the invention that is at least 10 nucleotides, and preferably at least 20 nucleotides, in length. Preferably, oligonucleotide primers and/or probes hybridize to a polynucleotide encoding a polypeptide described herein under moderately stringent conditions, as defined above. Oligonucleotide primers and/or probes which may be usefully employed in the diagnostic methods described herein preferably are at least 10-40 nucleotides in length. In a preferred embodiment, the oligonucleotide primers comprise at least 10 contiguous nucleotides, more preferably at least 15 contiguous nucleotides, of a DNA molecule having a sequence as disclosed herein. Techniques for both PCR based assays and hybridization assays are well known in the art (see, for example, Mullis et al., Cold Spring Harbor Symp. Quant. Biol., 51:263, 1987; Erlich ed., PCR Technology, Stockton Press, NY, 1989).

[4853] One preferred assay employs RT-PCR, in which PCR is applied in conjunction with reverse transcription. Typically, RNA is extracted from a biological sample, such as biopsy tissue, and is reverse transcribed to produce cDNA molecules. PCR amplification using at least one specific primer generates a cDNA molecule, which may be separated and visualized using, for example, gel electrophoresis. Amplification may be performed on biological samples taken from a test patient and from an individual who is not afflicted with a cancer. The amplification reaction may be performed on several dilutions of cDNA spanning two orders of magnitude. A two-fold or greater increase in expression in several dilutions of the test patient sample as compared to the same dilutions of the non-cancerous sample is typically considered positive.

[4854] In another aspect of the present invention, cell capture technologies may be used in conjunction, with, for example, real-time PCR to provide a more sensitive tool for detection of metastatic cells expressing pancreatic tumor antigens. Detection of pancreatic cancer cells in biological samples, e.g., bone marrow samples, peripheral blood, and small needle aspiration samples is desirable for diagnosis and prognosis in pancreatic cancer patients.

[4855] Immunomagnetic beads coated with specific monoclonal antibodies to surface cell markers, or tetrameric antibody complexes, may be used to first enrich or positively select cancer cells in a sample. Various commercially available kits may be used, including Dynabeads® Epithelial Enrich (Dynal Biotech, Oslo, Norway), StemSep™ (StemCell Technologies, Inc., Vancouver, BC), and RosetteSep (StemCell Technologies). A skilled artisan will recognize that other methodologies and kits may also be used to enrich or positively select desired cell populations. Dynabeads® Epithelial Enrich contains magnetic beads coated with mAbs specific for two glycoprotein membrane antigens expressed on normal and neoplastic epithelial tissues. The coated beads may be added to a sample and the sample then applied to a magnet, thereby capturing the cells bound to the beads. The unwanted cells are washed away and the magnetically isolated cells eluted from the beads and used in further analyses.

[4856] RosetteSep can be used to enrich cells directly from a blood sample and consists of a cocktail of tetrameric antibodies that targets a variety of unwanted cells and crosslinks them to glycophorin A on red blood cells (RBC) present in the sample, forming rosettes. When centrifuged over Ficoll, targeted cells pellet along with the free RBC. The combination of antibodies in the depletion cocktail determines which cells will be removed and consequently which cells will be recovered. Antibodies that are available include, but are not limited to: CD2, CD3, CD4, CD5, CD8, CD10, CD11b, CD14, CD15, CD16, CD19, CD20, CD24, CD25, CD29, CD33, CD34, CD36, CD38, CD41, CD45, CD45RA, CD45RO, CD56, CD66B, CD66e, HLA-DR, IgE, and TCRαβ.

[4857] Additionally, it is contemplated in the present invention that mAbs specific for pancreatic tumor antigens can be generated and used in a similar manner. For example, mAbs that bind to tumor-specific cell surface antigens may be conjugated to magnetic beads, or formulated in a tetrameric antibody complex, and used to enrich or positively select metastatic %%% tumor cells from a sample. Once a sample is enriched or positively selected, cells may be lysed and RNA isolated. RNA may then be subjected to RT-PCR analysis using %%% tumor-specific primers in a real-time PCR assay as described herein. One skilled in the art will recognize that enriched or selected populations of cells may be analyzed by other methods (e.g in situ hybridization or flow cytometry).

[4858] In another embodiment, the compositions described herein may be used as markers for the progression of cancer. In this embodiment, assays as described above for the diagnosis of a cancer may be performed over time, and the change in the level of reactive polypeptide(s) or polynucleotide(s) evaluated. For example, the assays may be performed every 24-72 hours for a period of 6 months to 1 year, and thereafter performed as needed. In general, a cancer is progressing in those patients in whom the level of polypeptide or polynucleotide detected increases over time. In contrast, the cancer is not progressing when the level of reactive polypeptide or polynucleotide either remains constant or decreases with time.

[4859] Certain in vivo diagnostic assays may be performed directly on a tumor. One such assay involves contacting tumor cells with a binding agent. The bound binding agent may then be detected directly or indirectly via a reporter group. Such binding agents may also be used in histological applications. Alternatively, polynucleotide probes may be used within such applications.

[4860] As noted above, to improve sensitivity, multiple tumor protein markers may be assayed within a given sample. It will be apparent that binding agents specific for different proteins provided herein may be combined within a single assay. Further, multiple primers or probes may be used concurrently. The selection of tumor protein markers may be based on routine experiments to determine combinations that results in optimal sensitivity. In addition, or alternatively, assays for tumor proteins provided herein may be combined with assays for other known tumor antigens.

[4861] The present invention further provides kits for use within any of the above diagnostic methods. Such kits typically comprise two or more components necessary for performing a diagnostic assay. Components may be compounds, reagents, containers and/or equipment. For example, one container within a kit may contain a monoclonal antibody or fragment thereof that specifically binds to a tumor protein. Such antibodies or fragments may be provided attached to a support material, as described above. One or more additional containers may enclose elements, such as reagents or buffers, to be used in the assay. Such kits may also, or alternatively, contain a detection reagent as described above that contains a reporter group suitable for direct or indirect detection of antibody binding.

[4862] Alternatively, a kit may be designed to detect the level of mRNA encoding a tumor protein in a biological sample. Such kits generally comprise at least one oligonucleotide probe or primer, as described above, that hybridizes to a polynucleotide encoding a tumor protein. Such an oligonucleotide may be used, for example, within a PCR or hybridization assay. Additional components that may be present within such kits include a second oligonucleotide and/or a diagnostic reagent or container to facilitate the detection of a polynucleotide encoding a tumor protein.

[4863] SEQ ID NOs of the instant application claim priority according to the following:

| | | | |
|---|---|---|---|
| application Ser. No. 60/265,305 | filed Jan. 30, 2001 | SEQ ID NOs: 1-74 | 566P1 |
| application Ser. No. 60/305,484 | filed Jul. 12, 2001 | SEQ ID NOs: 75-453 | 566P2 |
| application Ser. No. 60/333,626 | filed Nov. 27, 2001 | SEQ ID NOs: 454-455 | 566P3 |
| application Ser. No. 60/267,568 | filed Feb. 9, 2001 | SEQ ID NOs: 456-528 | 570P1 |
| application Ser. No. 60/265,682 | filed Jan. 31, 2001 | SEQ ID NOs: 529-4272 | 567P1 |
| application Ser. No. 60/278,651 | filed Mar. 21, 2001 | SEQ ID NOs: 4273-4345 | 567P2 |
| application Ser. No. 60/287,121 | filed Apr. 27, 2001 | SEQ ID NOs: 4346-4546 | 567P3 |
| application Ser. No. 60/313,999 | filed Aug. 20, 2001 | SEQ ID NOs: 4547-4554 | 567P5 |

[4864] The following Examples are offered by way of illustration and not by way of limitation.

### EXAMPLES

### Example 1

### Identification of Pancreatic Tumor Protein cDNAs from a PCR-Based Subtraction Library

[4865] This Example discloses the isolation and identification of cDNA molecules from a cDNA library enriched in polynucleotides encoding secreted and transmembrane proteins.

[4866] A cDNA library was constructed by the method of Kopcznski et al. from mRNA purified from rough endoplasmic reticulum (RER) isolated from primary pancreatic tumor cells (PANC 391-34). Proc. Natl. Acad. Sci. 95:9973-9978 (1998) (incorporated herein by reference in its entirety). Briefly, cDNA was prepared from isolated mRNA by employing standard methodology. See, e.g., Ausubel et al., “Short Protocols in Molecular Biology” (4^{th} ed., 1999). The resulting cDNAs were ligated into a LAMBDA ZAP EXPRESS™ vector (Stratagene; La Jolla, Calif.) and mass excision was then employed to generate a plasmid library in E. coli. Individual E. coli colonies were isolated and the cDNA clones subjected to nucleic acid sequencing. The nucleotide sequences of exemplary clones are disclosed herein as SEQ ID NOs:1-66, 75-152, 174-177, 182, 184-452, 454-4550. The predicted amino acid sequences of these clones are presented as SEQ ID NOs:67-74, 153-173, 178-181, 183, 453, 4551-4554 and 4558-4560.

[4867] A cDNA library was also constructed and cloned into the PCR2.1 vector (Invitrogen, Carlsbad, Calif.) by subtracting a pool of one or more tumor cDNAs with a pool of cDNA from normal tissues, for example, colon, spleen, brain, liver, kidney, lung, stomach and small intestine, using PCR subtraction methodologies (Clontech, Palo Alto, Calif.). The subtraction is performed using a PCR-based protocol, which is modified to generate larger fragments. Within this protocol, tester and driver double stranded cDNA are separately digested with five restriction enzymes that recognize six-nucleotide restriction sites (MluI, MscI, PvuII, SalI and StuI). This digestion results in an average cDNA size of 600 bp, rather than the average size of 300 bp that results from digestion with RsaI according to the Clontech protocol. This modification does not affect the subtraction efficiency. Two tester populations are then created with different adapters, and the driver library remains without adapters.

[4868] The tester and driver libraries are then hybridized using excess driver cDNA. In the first hybridization step, driver is separately hybridized with each of the tester cDNA populations. This results in populations of (a) unhybridized tester cDNAs, (b) tester cDNAs hybridized to other tester cDNAs, (c) tester cDNAs hybridized to driver cDNAs, and (d) unhybridized driver cDNAs. The two separate hybridization reactions are then combined, and rehybridized in the presence of additional denatured driver cDNA. Following this second hybridization, in addition to populations (a) through (d), a fifth population (e) is generated in which tester cDNA with one adapter is hybridized to tester cDNA with the second adapter. Accordingly, the second hybridization step results in enrichment of differentially expressed sequences which can be used as templates for PCR amplification with adapter-specific primers. The ends are then filled in, and PCR amplification is performed using adapter-specific primers. Only population (e), which contained tester cDNA that do not hybridize to driver cDNA, are amplified exponentially. A second PCR amplification step is then performed, to reduce background and further enrich differentially expressed sequences. This PCR-based subtraction technique normalizes differentially expressed cDNAs so that rare transcripts that are over-expressed in pancreatic tumor tissue may be recoverable. Such transcripts would be difficult to recover by traditional subtraction methods.

### Example 2

### Analysis of cDNA Expression of Pancreatic Tumor cDNAs Using Microarray Technology

[4869] To determine mRNA expression levels of the isolated cDNA clones, cDNA clones from the pancreatic tumor subtraction library were randomly picked and colony PCR amplified. Their mRNA expression levels in pancreatic tumor, normal pancreas and various other normal tissues were determined using microarray technology (Rosetta Inpharmatics, Inc., Kirkland, Wash.). Briefly, the PCR amplification products were arrayed onto slides into an array format, with each product occupying a unique location in the array. To do this, mRNA was extracted from the tissue sample to be tested, reverse transcribed, and fluorescent-labeled cDNA probes were generated. The microarrays were probed with the labeled cDNA probes, the slides scanned and fluorescence intensity was measured. Data was analyzed using software provided by the manufacturer.

[4870] In additional studies, sequences disclosed herein were evaluated for overexpression in specific tumor tissues by microarray analysis. Using this approach, clones from the cDNA library described in Example 1 were randomly picked, PCR amplified, and their mRNA expression profiles in tumor and normal tissues were examined using cDNA microarray technology essentially as described (Shena, M. et al., 1995 Science 270:467-70). In brief, the clones were arrayed onto glass slides as multiple replicas, with each location corresponding to a unique cDNA clone (as many as 5500 clones can be arrayed on a single slide, or chip). Each chip was hybridized with a pair of cDNA probes that were fluorescence-labeled with Cy3 and Cy5, respectively. Typically, 1 μg of polyA⁺ RNA was used to generate each cDNA probe. After hybridization, the chips were scanned and the fluorescence intensity recorded for both Cy3 and Cy5 channels. There were multiple built-in quality control steps. First, the probe quality was monitored using a panel of ubiquitously expressed genes. Secondly, the control plate also included yeast DNA fragments of which complementary RNA may be spiked into the probe synthesis for measuring the quality of the probe and the sensitivity of the analysis. Currently, the technology offers a sensitivity of 1 in 100,000 copies of mRNA. Finally, the reproducibility of this technology was ensured by including duplicated control cDNA elements at different locations.

[4871] Those cDNAs showing at least two-fold overexpression in tumor samples as compared to normal samples, and/or demonstrating overexpression based on visual analysis of the microarray data, were searched against Genbank and the results are shown in Table 2. These sequences are set forth in SEQ ID NOs:75-129. Full-length cDNA and protein sequences for 28 of these clones are dislosed in SEQ ID NOs:130-183 and are shown in Table 3.

TABLE 2
Microarray and Genbank Search Results for Pancreas cDNAs

| | | | | Pancrease Chip 2 Microarray Data | | | | |
|---|---|---|---|---|---|---|---|---|
| SEQ ID | | Well | Plate:well | | | Median | Median | |
| NO: | Element (384 | 384 | 96 | Clone ID | Ratio | Signal 1 | Signal 2 | Blastn |
| 75 | PCX352_r01c15 | a 15 | 838:A8 | 80150 | 2.37 | 0.648 | 0.273 | Hu. p53-induced protein PIGPC1, |
| | | | | | | | | transmembrane protein (THW gene) |
| 76 | PCX352_r01c16 | a 16 | 838:B8 | 80151 | 1.88 | 0.292 | 0.156 | Hu. serine (or cysteine) proteinase |
| | | | | | | | | inhibitor, clade E |
| 77 | PCX352_r01c23 | a 23 | 838:A12 | 80152 | 1.83 | 0.906 | 0.496 | Hu. keratin 18 (KRT18) |
| 78 | PCX352_r03c11 | c 11 | 838:E6 | 80153 | 1.06 | 0.481 | 0.456 | Hu. Rab geranylgeranyltransferase, beta |
| | | | | | | | | subunit (RABGGTB) |
| 79 | PCX352_r04c03 | d 3 | 838:G2 | 80154 | 1.06 | 0.193 | 0.183 | Hu. FAT tumor suppressor (Drosophila) |
| | | | | | | | | homolog (FAT) |
| 80 | PCX352_r04c11 | d 11 | 838:G6 | 80155 | 1.55 | 0.999 | 0.645 | Hu. mRNA for transmembrane protein |
| | | | | | | | | (THW gene), p53-induced protein |
| | | | | | | | | PIGPC1 (PIGPC1) |
| 81 | PCX352_r07c03 | g 3 | 839:E2 | 80156 | 0.95 | 0.253 | 0.266 | Hu. fibrillarin (FBL) |
| 82 | PCX352_r08c06 | h 6 | 839:H3 | 80157 | 0.76 | 0.273 | 0.359 | Hu. fibrillarin (FBL) |
| 83 | PCX352_r10c16 | j 16 | 840:D8 | 80158 | 2.75 | 0.937 | 0.34 | Hu. p53-induced protein PIGPC1, |
| | | | | | | | | transmembrane protein (THW gene) |
| 84 | PCX352_r10c24 | j 24 | 840:D12 | 80159 | 5.14 | 3.94 | 0.767 | Hu. similar to collagen, type I, alpha 1; |
| | | | | | | | | Collagen I, alpha-1 polypeptide |
| 85 | PCX352_r12c04 | l 4 | 840:H2 | 80161 | 1.89 | 0.51 | 0.27 | Hu. serine (or cysteine) proteinase |
| | | | | | | | | inhibitor, clade E |
| 86 | PCX352_r12c07 | l 7 | 840:G4 | 80162 | 0.77 | 0.314 | 0.407 | Hu. pM5 protein (PM5) |
| 87 | PCX352_r12c20 | l 20 | 840:H10 | 80163 | 1.55 | 0.72 | 0.466 | Hu. fibrillarin (FBL) |
| 88 | PCX352_r15c03 | o 3 | 841:E2 | 80164 | 1.5 | 0.178 | 0.119 | Hu. type I transmembrane receptor |
| | | | | | | | | (seizure-related protein)(PSK-1) |
| 89 | PCX352_r15c17 | o 17 | 841:E9 | 80165 | 2.14 | 1.219 | 0.568 | Hu. CD24 antigen (small cell lung |
| | | | | | | | | carcinoma cluster 4antigen) (CD24) |
| 90 | PCX352_r16c08 | p 8 | 841:H4 | 80166 | 0.59 | 0.192 | 0.329 | Hu. fibrillarin (FBL) |
| 91 | PCX353_r01c03 | a 3 | 842:A2 | 80167 | 2.68 | 0.071 | 0.027 | Hu. highly similar to glucose-6-phosphate |
| | | | | | | | | dehydrogenase; ubiquitin-like protein |
| | | | | | | | | (GdX) |
| 92 | PCX353_r02c11 | b 11 | 842:C6 | 80168 | 2.87 | 1.156 | 0.403 | Hu. p53-induced protein PIGPC1, |
| | | | | | | | | transmembrane protein (THW gene) |
| 93 | PCX353_r02c23 | b 23 | 842:C12 | 80169 | 2.72 | 1.001 | 0.368 | Hu. p53-induced protein PIGPC1, |
| | | | | | | | | transmembrane protein (THW gene) |
| 94 | PCX353_r06c08 | f 8 | 843:D4 | 80170 | 1.84 | 1.602 | 0.87 | Hu. keratin 18 (KRT18) |
| 95 | PCX353_r07c22 | g 22 | 843:F11 | 80171 | 1.6 | 0.588 | 0.368 | Hu. plastin 3 (T isoform) (PLS3) |
| 96 | PCX353_r08c06 | h 6 | 843:H3 | 80173 | 1.55 | 0.378 | 0.244 | Hu. liver-specific bHLH-Zip transcription |
| | | | | | | | | factor (LISCH7) |
| 97 | PCX353_r13c20 | m 20 | 845:B10 | 80175 | 1.22 | 0.26 | 0.214 | Hu. collagen, type XVIII, alpha 1 |
| | | | | | | | | (COL18A1) |
| 98 | PCX353_r13c23 | m 23 | 845:A12 | 80176 | 1.59 | 0.432 | 0.272 | Hu. tissue factor pathway inhibitor 2 |
| | | | | | | | | (TFPI2), placental protein 5 (PP5) |
| 99 | PCX353_r16c10 | p 10 | 845:H5 | 80178 | 1.72 | 1.116 | 0.649 | Hu. tumor antigen (L6) |
| 100 | PCX354_r01c03 | a 3 | 846:A2 | 80180 | 1.57 | 0.095 | 0.06 | Hu. small EDRK-rich factor 1B |
| | | | | | | | | (centromeric) (SERF1B) |
| 101 | PCX354_r03c02 | c 2 | 846:F1 | 80181 | 1.8 | 0.951 | 0.53 | Hu. p53-induced protein PIGPC1, |
| | | | | | | | | transmembrane protein (THW gene) |
| 102 | PCX354_r04c04 | d 4 | 846:H2 | 80183 | 1.17 | 0.301 | 0.258 | Hu. fibrillarin (FBL) |
| 103 | PCX354_r04c10 | d 10 | 846:H5 | 80184 | 1.76 | 0.545 | 0.31 | Hu. BAC clone RP11-549B18 from 18 |
| 104 | PCX354_r05c14 | e 14 | 847:B7 | 80185 | 2 | 1.475 | 0.739 | Hu. tumor antigen (L6) |
| 105 | PCX354_r05c21 | e 21 | 847:A11 | 80186 | 3.6 | 1.049 | 0.291 | Novel (short/poor sequence) |
| 106 | PCX354_r08c03 | h 3 | 847:G2 | 80187 | 3.03 | 0.335 | 0.11 | Hu. thrombospondin 2 (THBS2) |
| 107 | PCX354_r08c14 | h 14 | 847:H7 | 80188 | 1.58 | 1.032 | 0.654 | Hu. clone RP11-527G2, |
| | | | | | | | | DKFZP564A2416 protein |
| 108 | PCX354_r08c23 | h 23 | 847:G12 | 80189 | 2.38 | 1.421 | 0.596 | Hu. tumor antigen (L6) |
| 109 | PCX354_r09c15 | i 15 | 848:A8 | 80191 | 2.44 | 0.602 | 0.247 | Hu. p53-induced protein PIGPC1, |
| | | | | | | | | transmembrane protein (THW gene) |
| 110 | PCX354_r09c19 | i 19 | 848:A10 | 80192 | 2.22 | 0.753 | 0.339 | Hu. p53-induced protein PIGPC1, |
| | | | | | | | | transmembrane protein (THW gene) |
| 111 | PCX354_r11c13 | k 13 | 848:E7 | 80193 | 2 | 0.391 | 0.196 | Hu. sema domain, immunoglobulin |
| | | | | | | | | domain (Ig), short basicdomain, secreted, |
| | | | | | | | | (semaphorin) 3C (SEMA3C) |
| 112 | PCX354_r11c19 | k 19 | 848:E10 | 80194 | 2.2 | 1.718 | 0.783 | Hu. connective tissue growth factor |
| | | | | | | | | (CTGF) |
| 113 | PCX354_r12c15 | l 15 | 848:G8 | 80195 | 2.15 | 1.144 | 0.533 | Hu. p53-induced protein PIGPC1, |
| | | | | | | | | transmembrane protein (THW gene) |
| 114 | PCX355_r01c03 | a 3 | 850:A2 | 80196 | 1.79 | 0.092 | 0.051 | Human mitochondrion |
| 115 | PCX355_r02c11 | b 11 | 850:C6 | 80197 | 1.96 | 1.442 | 0.735 | Hu. connective tissue growth factor |
| | | | | | | | | (CTGF) |
| 116 | PCX355_r07c23 | g 23 | 851:E12 | 80198 | 1.91 | 1.295 | 0.679 | Hu. keratin 18 (KRT18) |
| 117 | PCX355_r10c23 | j 23 | 852:C12 | 80199 | 1.68 | 0.823 | 0.489 | Hu. keratin 18 (KRT18) |
| 118 | PCX353_r08c01 | h 1 | 843:G1 | 80172 | 1.65 | 0.482 | 0.291 | Hu. serine (or cysteine) proteinase |
| | | | | | | | | inhibitor, clade E |
| 119 | PCX353_r10c11 | j 11 | 844:C6 | 80174 | 1.45 | 0.412 | 0.285 | Hu. FAT tumor suppressor (Drosophila) |
| | | | | | | | | homolog (FAT) |
| 120 | PCX353_r15c02 | o 2 | 845:F1 | 80177 | 1.05 | 0.47 | 0.446 | Hu. similar to heterochromatin-like |
| | | | | | | | | protein 1 |
| 121 | PCX353_r16c16 | p 16 | 845:H8 | 80179 | 1.76 | 1.259 | 0.715 | Hu. transmembrane protein (THW gene), |
| | | | | | | | | PIGPC1 |
| 122 | PCX354_r09c03 | i 3 | 848:A2 | 80190 | 2.35 | 0.789 | 0.336 | Hu. p53-induced protein PIGPC1, |
| | | | | | | | | transmembrane protein (THW g |
| 123 | PCX355_r11c11 | k 11 | 852:E6 | 80200 | 1.9 | 0.881 | 0.463 | Hu. tumor antigen (L6) |
| 124 | PCX355_r15c13 | o 13 | 853:E7 | 80201 | 1.67 | 0.414 | 0.248 | Hu. stearoyl-CoA desaturase (SCD) |
| 125 | PCX356_r03c06 | c 6 | 854:F3 | 80203 | 1.58 | 0.59 | 0.373 | Hu. chromogranin B (secretogranin 1) |
| 126 | PCX356_r04c20 | d 20 | 854:H10 | 80204 | 3.1 | 0.062 | 0.02 | Hu. serine (or cysteine) proteinase |
| | | | | | | | | inhibitor, clade E |
| 127 | PCX356_r06c11 | f 11 | 855:C6 | 80205 | 2.01 | 1.117 | 0.556 | Hu. tumor antigen (L6), transmembrane 4 |
| | | | | | | | | superfamily member 1 |
| 128 | PCX356_r07c24 | g 24 | 855:F12 | 80207 | 1.69 | 0.301 | 0.178 | Novel - short sequence |
| 129 | PCX356_r12c21 | l 21 | 856:G11 | 80208 | 1.5 | 0.254 | 0.169 | Hu. Fer-1 (C. elegans)-like 3 (myoferlin) |

[4872] TABLE 3
Full-length cDNA and Protein sequences for Pancreas cDNAs

| SEQ ID NO: | | | |
|---|---|---|---|
| (Full-Length | | CLONE | |
| cDNA/Pro) | CLONE NAME | ID | GENBANK IDENTITY/SEQUENCE FROM BLASTN OF SEQID |
| 130/153 | IodesPancChip2-1 | 80150 | Hu. p53-induced protein PICPC1, transmembrane protein (THW gene) |
| 131/154 | IodesPancChip2-2 | 80151 | Hu. serine (or cysteine) proteinase inhibitor, clade E |
| 132/155 | IodesPancChip2-3 | 81052 | Hu. keratin 18 (KRT18) |
| 133/156 | IodesPancChip2-4 | 81053 | Hu. Rab geranylgeranyltransferase, beta subunit (RABGGTB) |
| 134/157 | IodesPancChip2-5 | 81054 | Hu. FAT tumor suppressor (Drosophila) homolog (FAT) |
| 135/158 | IodesPancChip2-7 | 80156 | Hu. fibrallarin (FBL) |
| 136/159 | IodesPancChip2-10 | 80159 | Hu. similar to collagen, type I, alpha 1; Collagen I, alpha-1 |
| | | | polypeptide |
| 137/160 | IodesPancChip2-13 | 80162 | Hu. pM5 protein (PM5) |
| 138/161 | IodesPancChip2-15 | 80164 | Hu. type I transmembrane receptor (seizure-related protein) (PSK-1) |
| 139/162 | IodesPancChip2-16 | 80165 | Hu. CD24 antigen (small cell lung carcinoma cluster 4antigen) (CD24) |
| 140 | IodesPancChip2-18 | 80167 | Hu. highly similar to glucose-6-phosphate dehydrogenase |
| 141/163 | | 80167 | Hu. ubiquitin-like protein (GdX) |
| 142/164 | IodesPancChip2-22 | 80171 | Hu. plastin 3 (T isoform) (PLS3) |
| 143/165 | IodesPancChip2-24 | 80173 | Hu. liver-specific bHLH-Zip transcription factor (LISCH7) |
| 144/166 | IodesPancChip2-26 | 80175 | Hu. collagen, type XVIII, alpha 1 (COL18A1) |
| 145/167 | IodesPancChip2-27 | 80176 | Hu. tissue factor pathway inhibitor 2 (TFPI2), placental protein 5 |
| | | | (PP5) |
| 146/168 | IodesPancChip2-29 | 80178 | Hu. tumor antigen (L6) |
| 147/169 | IodesPancChip2-31 | 80180 | (SERF1A) |
| 148/170 | LodesPancChip2-31 | 80180 | Hu. small EDRK-rich factor 1B (centromeric) (SERF1B) |
| 149/171 | IodesPancChip2-38 | 80187 | Hu. thrombospondin 2 (THBS2) |
| 150/172 | IodesPancChip2-44 | 80193 | Hu. sema domain, immunoglobulin domain (lg), short basicdomain, |
| | | | secreted, (semaphorin) 3C (SEMA3C) |
| 151/173 | IodesPancChip2-45 | 80194 | Hu. connective tissue growth factor (CTGF) |
| 152 | IodesPancChip2-47 | 80196 | Human pHL-1 gene, c-myc oncogene containing coxIII sequence |
| 174/178 | IodesPancChip2-28 | 80177 | Heterochromatin-like protein 1 |
| 175/179 | IodesPancChip2-52 | 80201 | Hu. stearoyl-CoA desaturase (SCD) |
| 176/180 | IodesPancChip2-54 | 80203 | Hu. chromogranin B (secretogranin 1) |
| 177/181 | IodesPancChip2-59 | 80208 | Hu. Fer-1 (C. elegans)-like 3 (myoferlin) |
| 182/183 | IodesPancChip2-11 | 80160 | Hu. clone MGC:15409; 93% homolgy to NF-IL6 |

### Example 3

### Identification of Additional Pancreatic Tumor Protein cDNAs from an Expression Library

[4873] The PCR-based subtraction library described in Example I was further screened to isolate additional cDNAs expressed in pancreatic tumor cells. An additional 268 clones were identified and are disclosed in SEQ ID NOs:184-452. The clones were sequenced and the sequences used in a BLAST search against Genbank. Those sequences showing some degree of similarity to sequences in Genbank are described in Table 4. Those sequences showing no significant similarity to sequences in Genbank are listed in Table 5.

TABLE 4
Pancreas Tumor Sequences Showing Some Degree of Similarity to Sequences in Genbank

| SEQ ID NO: | | | |
|---|---|---|---|
| (Full-Length | | CLONE | GENBANK IDENTITY/SEQUENCE FROM BLASTN OF |
| cDNA) | CLONE NAME | ID | SEQID |
| 185 | PNCM-2 | 71232 | Hu. putative ionotropic glutamate receptor |
| | | | GLURR2 |
| 186 | PNCM-3 | 71233 | Hu. accessory proteins BAP31/BAP29, 6C6-Ag, |
| | | | CDM |
| 188 | PNCM-5 | 71235 | Hu. prosaposin (PSAP), sphingolipid activator |
| | | | protein 1 |
| 189 | PNCM-6 | 71236 | Hu. similar to adaptor-related protein complex 3, |
| | | | sigma 2subunit |
| | | | Hu. alanyl (membrane) aminopeptidase |
| | | | (aminopeptidase N) |
| 190 | PNCM-7 | 71237 | Hu. prosaposin |
| 191 | PNCM-8 | 73408 | Hu. ribosome binding protein 1, ES/130 |
| 192 | PNCM-9 | 73409 | Hu. kinectin 1 (kinesin receptor) (KTN1) |
| 193 | PNCM-11 | 73410 | Hu. Protein A kinase (PPKA) anchor protein |
| | | | (gravin) 12 |
| 194 | PNCM-12 | 71238 | Hu. golgi autoantigen, golgin subfamily a, 4 |
| | | | (GOLGA4) |
| 195 | PNCM-13 | 73411 | Hu. kinectin 1 (kinesin receptor) (KTN1) |
| 196 | PNCM-14 | 71239 | Hu. prosaposin |
| 197, 198 | PNCM-15 | 73412 | Hu. prosaposin |
| 199 | PNCM-16 | 71240 | Hu. prosaposin |
| 200 | PNCM-18 | 71241 | Hu. prosaposin |
| 201 | PNCM-19 | 71242 | Hu. centromere protein F (350/400kD, mitosin) |
| | | | (CENPF) |
| 202 | PNCM-20 | 73413 | Hu. lamin A/C (nuclear env. protein) |
| 203 | PNCM-21 | 71243 | Hu. prosaposin |
| 204 | PNCM-22 | 71244 | Hu. prosaposin |
| 205 | PNCM-23 | 71245 | Hu. methyl-CpG binding domain protein 2 (MBD2) |
| 206 | PNCM-24 | 71246 | Hu. prosaposin |
| 207 | PNCM-25 | 71247 | Hu. prosaposin |
| 208 | PNCM-26 | 71248 | Hu. prosaposin |
| 209 | PNCM-27 | 71249 | Hu. E3 ubiquitin ligase SMURF2 |
| 210 | PNCM-28 | 73414 | Hu. Kinectin 1 |
| 211 | PNCM-29 | 71250 | Hu. fer-1 (C. elegans)-like 3 (myoferlin) (FER1L3) |
| 214 | PNCM-32 | 71253 | Hu. ECSIT (Toll/IL-1 signal transduction) |
| 215 | PNCM-33 | 71254 | Hu. villin 2, cytovillin 2, (ezrin) (VIL2) |
| 216, 217 | PNCM-34 | 71255 | Hu. mitotic checkpoint protein isoform MAD1a |
| | | | (MAD1) |
| 218 | PNCM-35 | 71256 | Hu. Homer-2A |
| 219 | PNCM-36 | 73415 | Macaca fascicularis brain cDNA, clone:QflA-11332 |
| 220 | PNCM-37 | 71257 | Hu. prosaposin |
| 221 | PNCM-38 | 71258 | Hu. methyl-CpG binding domain protein 2 (MBD2) |
| 222 | PNCM-39a | 71259 | Hu. lamin A/C (nuclear env. protein) |
| 223 | PNCM-39b | 73416 | Hu. sphingolipid activator proteins 1 and 2 |
| | | | processedmutant |
| 224 | PNCM-40 | 71260 | Hu. rabaptin-5 (RAB5EP) (endocytic transport) |
| 225 | PNCM-41 | 73376 | Hu. fer-1 |
| 226 | PNCM-42 | 73377 | Hu. CD36 antigen-like 2, lysosomal |
| | | | sialoglycoprotein |
| 227 | PNCM-43 | 73378 | Hu. Protein A kinase (PPKA) anchor protein |
| | | | (gravin) 12 |
| 228 | PNCM-44 | 73379 | Hu. Prosaposin |
| 229, 230 | PNCM-47 | 73381 | Hu. mitochondrion |
| 231 | PNCM-48 | 73382 | Hu. vimentin (VIM) |
| 232, 233 | PNCM-49 | 73383 | Hu. hydroxysteroid (17-beta) dehydrogenase 4 |
| 234, 235 | PNCM-50 | 73384 | Hu. amyloid beta (A4) precursor-like protein 2 |
| | | | (APLP2) |
| 236 | PNCM-51 | 73385 | Hu. Ran binding protein 2 |
| 237 | PNCM-53 | 73386 | Hu. alanyl (membrane) aminopeptidase |
| | | | (aminopeptidase N) |
| 238 | PNCM-56 | 73387 | Hu. kinectin 1 (kinesin receptor) (KTN1) |
| 239, 240 | PNCM-57 | 73388 | Hu. kinectin 1 (Reverse orientation) |
| 241, 242 | PNCM-58 | 73389 | Hu. vimentin (VIM) |
| 243 | PNCM-59 | 73390 | Hu. glutahione-S-transferase like; |
| | | | glutahionetransferase omega |
| 244 | PNCM-60 | 73391 | Hu. ribosome binding protein 1, ES/130, KIAA |
| | | | 1398 |
| 245 | PNCM-61 | 73417 | Hu. Ran binding protein 2 |
| 246 | PNCM-62 | 73392 | Hu. putative ionotropic glutamate receptor |
| | | | GLURR2 |
| 247 | PNCM-63 | 73393 | Hu. fer-1 (C. elegans)-like 3 (myoferlin) (FER1L3) |
| 248 | PNCM-65 | 73418 | Hu. transferrin receptor (p90, CD71) (TFRC) |
| 249 | PNCM-66 | 73395 | Hu. ribosome binding protein 1, ES/130, KIAA |
| | | | 1398 |
| 250 | PNCM-67 | 73396 | Hu. Similar to glucose regulated protein, 58kDa, |
| | | | cloneMGC:3178 |
| 251 | PNCM-68 | 73397 | Hu. kinectin 1 (kinesin receptor) (KTN1) |
| 252, 253 | PNCM-69 | 73419 | Hu. cDNA FLJ10480 fis, clone NT2RP2000126 |
| 254 | PNCM-70 | 73398 | Hu. kinectin 1 (kinesin receptor) (KTN1) |
| 255, 256 | PNCM-71 | 73399 | Hu. TATA element modulatory factor 1 (TMF1) |
| 257 | PNCM-72 | 73400 | Hu. enoyl Coenzyme A hydratase 1, peroxisomal |
| | | | (ECH1) |
| 258, 259 | PNCM-73 | 73420 | Hu. prosaposin |
| 260 | PNCM-74 | 73401 | Hu. vimentin (VIM) [bp] |
| 261 | PNCM-77 | 73404 | Hu. prosaposin |
| 262 | PNCM-78 | 73405 | Hu. golgi autoantigen, golgin subfamily a, 4 |
| | | | (GOLGA4) |
| 263, 264 | PNCM-80 | 73407 | Hu. kinectin 1 (kinesin receptor) (KTN1) |
| 265 | PNCM-81 | 72174 | Hu. ribosomal protein L9 |
| 266 | PNCM-82 | 72175 | Hu. putative transmembrane protein |
| 267 | PNCM-83 | 72176 | Hu. kinectin 1 (kinesin receptor) (KTN1) |
| 268 | PNCM-84 | 72177 | Hu. prosaposin |
| 269 | PNCM-85 | 72178 | Hu. ORF (LOC51035) w/CpGIsland and Ubiq.- |
| | | | binding domains |
| 270 | PNCM-86 | 72179 | Hu. Protein A kinase (PRKA) anchor protein |
| | | | (gravin) 12 (AKAP12) |
| 271, 272 | PNCM-87 | 73421 | Hu. heat shock 105kD, antigen NY-CO-25 |
| 273 | PNCM-88 | 72180 | Hu. heat shock 105kD, antigen NY-CO-25 (Colon |
| | | | cancer Ag.) |
| 274 | PNCM-89 | 72181 | Hu. ferritin, heavy polypeptide 1 (FTH1) |
| 275 | PNCM-90 | 72182 | Hu. frizzled (Drosophila) homolog 6 (FZD6) |
| 276 | PNCM-91 | 72183 | Hu. vimentin (VIM) |
| 277 | PNCM-92 | 72184 | Hu. Ran binding protein 2 [bp 198-610], sperm |
| | | | membrane protein BS-63, nucleoporin (NUP358) |
| 278 | PNCM-93 | 72185 | Hu. kinectin 1 (kinesin receptor) (KTN1) |
| 279 | PNCM-94 | 72186 | Hu. Tax-1 (T-cell leukemia virus type I) |
| | | | bindingprotein 1 (TAX1BP1) [bp 923-1335]; |
| | | | TRAF6-binding protein T6BP (IL-1 signaling) |
| 280 | PNCM-95 | 72187 | Hu. kinectin 1 (kinesin receptor) (KTN1) [bp 813- |
| | | | 1223] |
| 281 | PNCM-96 | 72188 | Hu. prosaposin [bp 608-1018] |
| 282 | PNCM-97 | 72189 | Hu. heat shock 105kD . . . [bp 1-412] |
| 283 | PNCM-98 | 72190 | Hu. clone IMAGE:3449323 |
| 284 | PNCM-99 | 72191 | Hu. rabaptin-5 [bp 1578-1990] |
| 285 | PNCM-100 | 72192 | Hu. TNF receptor-1 associated protein (TRADD) |
| 286 | PNCM-101 | 72193 | Hu. trans-Golgi network protein |
| 287 | PNCM-102 | 72194 | Hu. IMAGE:3355762, chromodomain helicase |
| | | | DNA binding protein 1-like |
| 288 | PNCM-103 | 72195 | Hu. ribosome binding protein 1, ES/130 [bp 1563- |
| | | | 1975], KIAA1398 |
| 289 | PNCM-106 | 72196 | Hu. ubiquinol-cytochrome c reductase core protein |
| | | | II (UQCRC2) |
| 290 | PNCM-110 | 72197 | Hu. ribosome binding protein 1, ES/130 [bp 717- |
| | | | 1129], KIAA1398 |
| 291 | PNCM-112 | 72198 | Hu. accessory proteins BAP31/BAP29 [bp 237-648], |
| | | | 6C6-Ag, CDM |
| 292 | PNCM-113 | 72199 | Hu. M-phase phosphoprotein 1 (MPHOSPH1) |
| 293 | PNCM-114 | 72200 | Hu. serine palmitoyltransferase, subunit I (enzyme |
| | | | in sphingolipid biosynth.) |
| 294 | PNCM-115 | 72201 | Hu. kinectin 1 (kinesin receptor) (KTN1) [bp 1896- |
| | | | 2306] |
| 295 | PNCM-116 | 72202 | Hu. Tax-1 [bp 1-380] |
| 296 | PNCM-117 | 72203 | Hu. methyl-CpG binding domain protein 2 (MDB2) |
| 297 | PNCM-118 | 72204 | Hu. cDNA: FLJ23027 fis, clone LNG01826 |
| 298 | PNCM-119 | 72205 | Hu. cDNA DKFZp586F1918 |
| 299, 300 | PNCM-120 | 72206 | Macaca fascicularis brain cDNA, clone QflA-11332 |
| 301 | PNCM-122 | 73422 | Hu. heat shock 105kD, antigen NY-CO-25 |
| 302 | PNCM-123 | 73423 | Hu. IMAGE:3355762, chromodomain helicase |
| | | | DNA binding protein 1-like |
| 303 | PNCM-124 | 73424 | Hu. kinectin 1 (kinesin receptor) KTN1) [bp] |
| 304, 305 | PNCM-125 | 73425 | Hu. vimentin (VIM) [bp] |
| 306 | PNCM-126 | 74597 | Hu. prosaposin |
| 307, 308 | PNCM-128 | 73426 | Hu. cleavage stimulation factor, subunit 3, |
| | | | 77kD (CSTF3) |
| 309, 310 | PNCM-129 | 73427 | Hu. diazepam binding inhibitor (GABA receptor |
| | | | modulator, acyl-Coenzyme A binding protein) |
| 311 | PNCM-131 | 73428 | Hu. prosaposin |
| 312 | PNCM-132 | 73429 | Hu., Similar to glucose regulated protein, 58kDa, |
| | | | cloneMGC:3178 |
| 313, 314 | PNCM-133 | 74598 | Hu. kinectin 1 (kinesin receptor) (KTN1) |
| 315 | PNCM-134 | 74599 | Hu. prosaposin |
| 316 | PNCM-135 | 73430 | Hu., Similar to glucose regulated protein, 58 kDa, |
| | | | cloneMGC:3178 |
| 317, 318 | PNCM-136 | 74600 | Hu. ferritin, heavy polypeptide 1 (FTH1) |
| 319, 320 | PNCM-137 | 74601 | Hu. accessory proteins BAP31/BAP29, 6C6- |
| | | | Ag, CDM |
| 321, 322 | PNCM-138 | 73437 | Hu. RER1 protein (RER1) |
| 323, 324 | PNCM-139 | 73438 | Hu. prosaposin |
| 325, 326 | PNCM-141 | 73439 | Hu. Tax-1 (T-cell leukemia virus type I) |
| | | | bindingprotein (TAX1BP1) |
| 327, 328 | PNCM-142 | 73440 | Hu. Protein A kinase (PRKA) anchor protein |
| | | | (gravin) 12 |
| 329 | PNCM-143 | 73441 | Hu. prosaposin |
| 330, 331 | PNCM-144 | 73442 | Hu. prosaposin |
| 332, 333 | PNCM-145 | 73443 | Hu., Similar to glucose regulated protein, 58 kDa, |
| | | | cloneMGC:3178 |
| 336 | PNCM-147 | 74602 | Hu. fer-1 (C. elegans)-like 3 (myoferlin) (FER1L3) |
| 337 | PNCM-148 | 73445 | Hu. prosaposin (PSAP), sphingolipid activator |
| | | | protein 1 |
| 338 | PNCM-150 | 73456 | Hu. heat shock 105kD, antigen NY-CO-25 |
| 339 | PNCM-151 | 73585 | Hu. heat shock 105kD (HSP-105B) |
| 340, 341 | PNCM-152 | 73586 | Hu. Protein A kinase (PRKA) anchor protein |
| | | | (gravin) 12 |
| 342, 343 | PNCM-153 | 73587 | Hu. cleavage stimulation factor, subunit 3, |
| | | | 77kD (CSTF3) |
| 344, 345 | PNCM-154 | 73457 | Hu. methyl-CpG binding domain protein 2 (MBD2) |
| 346, 347 | PNCM-155 | 74603 | Hu. Protein A kinase (PRKA) anchor protein |
| | | | (gravin) 12 |
| 348 | PNCM-157 | 73458 | Hu. Protein A kinase (PRKA) anchor protein |
| | | | (gravin) 12 |
| 349, 350 | PNCM-158 | 73459 | Hu. low density lipoprotein-related protein- |
| | | | associated protein 1 |
| 351, 352 | PNCM-159 | 73460 | Hu. prosaposin |
| 353 | PNCM-160 | 73461 | Hu. accessory proteins BAP31/BAP29 [bp 155- |
| | | | 662], 6C6-Ag, CDM |
| 354, 355 | PNCM-161 | 74604 | Hu. cleavage stimulation factor, subunit 3, |
| | | | 77kD (CSTF3) |
| 356, 357 | PNCM-162 | 74605 | Hu. prosaposin, Hu. Tax-1 |
| 358, 359 | PNCM-163 | 74606 | Hu. leucine zipper-EF-hand containing |
| | | | transmembrane protein 1 (LETM1) |
| 360, 361 | PNCM-164 | 74607 | Hu. CD36 antigen-like 2, lysosomal |
| | | | sialoglycoprotein |
| 362, 363 | PNCM-165 | 74608 | Hu. prosaposin |
| 364 | PNCM-167 | 74610 | Hu. transmembrane protein (63kD) |
| 365 | PNCM-169 | 74611 | Hu. IMAGE:3355762, FLJ22530 fis, clone |
| | | | HRC12866, Hu. prosaposin, Hu. Tax-1 |
| 366, 367 | PNCM-171 | 74613 | Hu. leucine rich repeat (in FLII) interacting protein |
| | | | 1 (LRRFIP1) |
| 368, 369 | PNCM-172 | 74614 | Hu. prosaposin |
| 370, 371 | PNCM-173 | 74640 | Hu. prosaposin |
| 372, 373 | PNCM-174 | 74615 | Hu., Similar to glucose regulated protein, 58 kDa, |
| | | | cloneMGC:3178 |
| 374, 375 | PNCM-175 | 74616 | Hu., Similar to glucose regulated protein, 58 kDa, |
| | | | cloneMGC:3178 |
| 376 | PNCM-176 | 74617 | Hu. prosaposin |
| 377 | PNCM-177 | 77101 | Hu. cleavage stimulation factor subunit 3 |
| | | | 77kD (CSTF3) |
| 378 | PNCM-178 | 77102 | Hu. Protein Protein A kinase (PRKA) anchor |
| | | | protein (gravin) 12 |
| 379 | PNCM-180 | 77104 | Hu. prosaposin |
| 380, 381 | PNCM-182 | 74618 | Hu. prosaposin |
| 382 | PNCM-183 | 74619 | Hu. Ran binding protein 2, sperm membrane protein |
| | | | BS-63, nucleoporin |
| 383, 384 | PNCM-185 | 74620 | Hu. prosaposin |
| 385, 386 | PNCM-186 | 74621 | Hu. ribosome binding protein 1, KIAA1398, clone |
| | | | RP11-462D18 (5-prime) |
| 387, 388 | PNCM-188 | 74623 | Hu. IMAGE:3355762, FLJ22530 fis, clone |
| | | | HRC12866 |
| 389, 390 | PNCM-189 | 74624 | Hu., Similar to glucose regulated protein, 58 kDa, |
| | | | cloneMGC:3178 |
| 391, 392 | PNCM-190 | 74625 | Hu. Ran binding protein 2, sperm membrane protein |
| | | | BS-63, nucleoporin |
| 393 | PNCM-191 | 74631 | Hu. diazepam binding inhibitor (GABA receptor |
| | | | modulator, acyl-Coenzyme A binding protein) |
| 394, 395 | PNCM-193 | 74632 | Hu. endozepine, vimentin |
| 396 | PNCM-202 | 77105 | Hu. glucose-regulated protein, 58kD (GRP58) |
| 397 | PNCM-208 | 77108 | Hu. rabaptin-5 (RAB5EP) |
| 398 | PNCM-210 | 77109 | Hu. vimentin (VIM) |
| 399 | PNCM-215 | 77114 | Hu. hypothetical protein FLJ10634, clone |
| | | | MGC:944 |
| 400 | PNCM-219 | 77118 | Hu. alanyl (membrane) amineopeptidase |
| | | | (aminopeptidase N) |
| 401 | PNCM-221 | 77120 | Hu. similar to RAN binding protein 2 [bp |
| | | | 576 . . . ], nucleoporin (NUP358), sperm-binding |
| | | | protein |
| 402 | PNCM-223 | 77122 | Hu. cell surface glycoprotein/cell adhesion |
| | | | molecule CD44 |
| 403 | PNCM-224 | 77123 | Hu. sperm membrane protein BS-63, RANBP2 |
| 404 | PNCM-226 | 77125 | Hu. Protein Protein A kinase (PRKA) anchor |
| | | | protein (gravin) 12 |
| 405 | PNCM-229 | 77127 | Prosaposin |
| 406 | PNCM-231 | 77129 | Hu. Vimentin |
| 407 | PNCM-232 | 77130 | Prosaposin |
| 408 | PNCM-234 | 77132 | Prosaposin |
| 409 | PNCM-237 | 77134 | Hu. Vimentin |
| 410 | PNCM-238 | 77135 | Hu. accessory proteins BAP31/BAP29, 6C6- |
| | | | Ag, CDM |
| 411 | PNCM-239 | 77136 | Hu. ribosomal protein P0 |
| 412 | PNCM-243 | 77139 | Hu. rabaptin-5 (RAB5EP) |
| 413 | PNCM-244 | 77140 | Prosaposin |
| 414 | PNCM-245 | 77141 | Hu., Similar to glucose regulated protein, 58 kDa, |
| | | | cloneMGC:3178 |
| 415 | PNCM-248 | 77144 | Hu. ORF (LOC51035); Similar to ORF, clone |
| | | | MGC:2274; clone MGC:5321 |
| 416 | PNCM-250 | 77146 | Hu. accessory proteins BAP31/BAP29 [bp 404], 6C6- |
| | | | Ag, CDM |
| 417 | PNCM-253 | 77149 | Hu. methyl-CpG binding domain protein 2 (MBD2) |
| 418 | PNCM-258 | 77474 | Hu. Sim. to glucose-reg. protein [bp 1-99]; 60bp: |
| | | | cGMP-specific phosphodiesterase |
| 419 | PNCM-266 | 77153 | Hu. fer-1 (C. elegans)-like 3 (myoferlin) (FER1L3) |
| 420 | PNCM-267 | 77479 | Hu. Kinectin 1 |
| 421 | PNCM-268 | 77154 | Hu. accessory proteins BAP31/BAP29, 6C6- |
| | | | Ag, CDM |
| 422 | PNCM-269 | 77155 | Hu. Kinectin 1 |
| 423 | PNCM-271 | 77157 | Hu. Kinectin 1 |
| 424 | PNCM-272 | 77480 | Hu. accessory proteins BAP31/BAP29, 6C6- |
| | | | Ag, CDM |
| 425 | PNCM-278 | 77485 | Prosaposin |
| 426 | PNCM-282 | 77487 | Hu. methyl-CpG binding domain protein 2 |
| | | | (MBD2), antigen NY-CO-41 |
| 427 | PNCM-283 | 77488 | Hu. Kinectin 1 |
| 428 | PNCM-287 | 77490 | Hu. Kinectin 1 |
| 429 | PNCM-293 | 77494 | Hu. ribosome binding protein 1, ES/130 |
| 430 | PNCM-294 | 77495 | Hu. leucine zipper-EF-hand containing |
| | | | transmembraneprotein 1 (LETM1) |
| 431 | PNCM-298 | 77499 | Hu. ribosome binding protein 1, ES/130 |
| 432 | PNCM-300 | 77500 | Prosaposin |
| 433 | PNCM-310 | 77160 | Hu. uveal autoantigen |
| 434 | PNCM-311 | 77504 | Hu. accessory proteins BAP31/BAP29, 6C6- |
| | | | Ag, CDM |
| 435 | PNCM-314 | 77506 | Prosaposin |
| 436 | PNCM-316 | 77507 | Hu. Protein Protein A kinase (PRKA) anchor |
| | | | protein (gravin) 12 |
| 437 | PNCM-318 | 77508 | Prosaposin |
| 438 | PNCM-320 | 77509 | Hu. ribosome binding protein 1, ES/130 |
| 439 | PNCM-321 | 77162 | Hu. uveal autoantigen |
| 440 | PNCM-322 | 77163 | Hu. chromodomain helicase DNA binding protein 1- |
| | | | like (CHD1L) |
| 441 | PNCM-324 | 77165 | Hu. accessory proteins BAP31/BAP29, 6C6- |
| | | | Ag, CDM |
| 442 | PNCM-326 | 77167 | Hu. eukaryotic translation initiation factor 2, subunit |
| | | | 2 (beta, 38kD) (EIF2S2) |
| 443 | PNCM-329 | 77169 | Hu. uveal autoantigen |
| 444 | PNCM-331 | 77171 | Hu. Prosaposin |
| 445 | PNCM-332 | 77172 | Hu. alanyl (membrane) aminopeptidase |
| | | | (aminopeptidase N) |
| 446 | PNCM-333 | 77173 | Hu. Prosaposin |
| 447 | PNCM-337 | 77175 | Hu., Similar to glucose regulated protein, 58kDa, |
| | | | cloneMGC:3178 |
| 448 | PNCM-338 | 77176 | Hu. M-phase phosphoprotein 1 |
| 449 | PNCM-341 | 77178 | Hu. cDNA DKFZp586F1918 |
| 450 | PNCM-345 | 77180 | Hu. accessory proteins BAP31/BAP29 6C6- |
| | | | Ag, CDM |
| 451 | PNCM-348 | 77510 | Prosaposin |

[4874] TABLE 5
Pancreas Tumor Sequences Showing no Significant Similarity to Sequences in Genbank

| SEQ ID NO: | | | |
|---|---|---|---|
| (Full-Length | | CLONE | GENBANK IDENTITY/SEQUENCE FROM BLASTN OF |
| cDNA/Pro) | CLONE NAME | ID | SEQID |
| 184 | PNCM-1 | 71231 | |
| 187 | PNCM-4 | 71234 | No match to bp376 − 50bp @ 92% w/prosaposin − |
| | | | 100bp no matchl |
| 212 | PNCM-30 | 71251 | |
| 213 | PNCM-31 | 71252 | |
| 334, 335 | PNCM-146 | 73444 | |

### Example 4

### Full- Length Sequence and Expression Analysis of the PN80E Pancreatic Tumor Protein cDNA

[4875] The full-length sequence of the cDNA clone 80186, (partial sequence disclosed in SEQ ID NO:105), was determined and is disclosed in SEQ ID NO:454. This sequence as used to search against public databases and the results are described in Table 6.

TABLE 6
Database Search Results for clone 80186, pancreatic tumor candidate Pn80E

| SEQ ID NO | | | |
|---|---|---|---|
| (Partial/Full- | | Candidate | |
| length): | Clone ID | Name | GenBank Blastn Results |
| 105/454 | 80186 | Pn80E | 89% Mus musculus 18 days embryo cDNA, RIKEN full- |
| | | | length enriched library, clone:1110014B07-a secreted |
| | | | protein, with a C1q domain |

[4876] The mRNA expression profile was then further analyzed by real-time PCR. The first-strand cDNA used in the quantitative real-time PCR was synthesized from 20 μg of total RNA that was treated with DNase I (Amplification Grade, Gibco BRL Life Technology, Gaithersburg, Md.), using Superscript Reverse Transcriptase (RT) (Gibco BRL Life Technology, Gaithersburg, Md.). Real-time PCR was performed with a GeneAmpTM 5700 sequence detection system (PE Biosystems, Foster City, Calif.). The 5700 system uses SYBR™ green, a fluorescent dye that only intercalates into double stranded DNA, and a set of gene-specific forward and reverse primers. The increase in fluorescence was monitored during the whole amplification process. The optimal concentration of primers was determined using a checkerboard approach and a pool of cDNAs from breast tumors was used in this process. The PCR reaction was performed in 25 μl volumes that included 2.5 μl of SYBR™ green buffer, 2 μl of cDNA template and 2.5 μl each of the forward and reverse primers for the gene of interest. The cDNAs used for RT reactions were diluted 1:10 for each gene of interest and 1:100 for the β-actin control. In order to quantitate the amount of specific cDNA (and hence initial mRNA) in the sample, a standard curve was generated for each run using the plasmid DNA containing the gene of interest. Standard curves were generated using the Ct values determined in the real-time PCR which were related to the initial cDNA concentration used in the assay. Standard dilution ranging from 20-2×10⁶ copies of the gene of interest was used for this purpose. In addition, a standard curve was generated for β-actin ranging from 200 fg-2000 fg. This enabled standardization of the initial RNA content of a tissue sample to the amount of β-actin for comparison purposes. The mean copy number for each group of tissues tested was normalized to a constant amount of β-actin, allowing the evaluation of the over-expression levels seen with each of the genes.

[4877] Real-time PCR analysis as described above showed that Pn80E is over-expressed in a panel of pancreatic tumors, including metastatic tumors. Pn80E is also expressed in normal pancreas tissue, adrenal gland, aorta, skin and trachea. Low levels of expression were observed in bone, brain, bronchus, colon, esophagus, heart, kidney, liver, lung, pituitary, skeletal muscle, spinal cord, and spleen. These differential expression patterns indicate that this antigen may be used for immunotherapeutic purposes and/or as a diagnostic marker in individuals with pancreatic cancer.

### Example 5

### Full-Length Sequence and Expression Analysis of the PN81E Pancreatic Tumor Protein cDNA

[4878] The full-length sequence of the cDNA clone 80207, (partial sequence disclosed in SEQ ID NO:128), was determined and is disclosed in SEQ ID NO:455. No matches were identified when this sequence was used to search agains public databases.

[4879] The mRNA expression profile of Pn81E was then analyzed by real-time PCR as described in Example 4. This analysis showed that Pn81E is over-expressed in a panel of pancreatic tumors and normal pancreas samples as compared to a panel of normal tissues including bone marrow, esophagus, gall bladder, heart, kidney, lung, skeletal muscle, small intestine, and stomach. Expression was observed in bone, PBMC, and spleen. Lower levels of expression were observed in brain, bronchus, colon, liver, pituitary gland, skin, spinal chord, and trachea. These results indicate that the Pn81E antigen may be used in diagnostic and immunotherapy applications.

### Example 6

### Preparation of a PCR-Based cDNA Subtraction Library from Pancreatic Tumors

[4880] A cDNA subtraction library containing cDNA from primary pancreatic tumors subtracted with cDNA from normal tissues (liver, salivary gland, small intestine, stomach, heart, brain, bone marrow and normal lung) was constructed as follows. Total RNA was extracted from primary tissues using Trizol reagent (Gibco BRL Life Technologies, Gaithersburg, Md.) as described by the manufacturer. The polyA+ RNA was purified using an oligo(dT) cellulose column according to standard protocols. First strand cDNA was synthesized using the primer supplied in a Clontech PCR-Select cDNA Subtraction Kit (Clontech, Palo Alto, Calif.). The driver DNA consisted of cDNAs from normal tissues with the tester cDNA being from two primary pancreatic tumors. Double-stranded cDNA was synthesized for both tester and driver, and digested with a combination of endonucleases (MluI, MscI, PvuII, SalI and StuI) which recognize six-nucleotide restriction sites. This modification of the digestion procedure resulted in an average cDNA size of 600 bp, rather than the average size of 300 bp that results from digestion with RsaI according to the Clontech protocol. This modification did not affect the subtraction efficiency. The digested tester cDNAs were ligated to two different adaptors and the subtraction was performed according to Clontech's protocol.

[4881] The tester and driver libraries were then hybridized using excess driver cDNA. In the first hybridization step, driver was separately hybridized with each of the two tester cDNA populations. This resulted in populations of (a) unhybridized tester cDNAs, (b) tester cDNAs hybridized to other tester cDNAs, (c) tester cDNAs hybridized to driver cDNAs and (d) unhybridized driver cDNAs. The two separate hybridization reactions were then combined, and rehybridized in the presence of additional denatured driver cDNA. Following this second hybridization, in addition to populations (a) through (d), a fifth population (e) was generated in which tester cDNA with one adapter hybridized to tester cDNA with the second adapter. Accordingly, the second hybridization step resulted in enrichment of differentially expressed sequences which could be used as templates for PCR amplification with adaptor-specific primers.

[4882] The ends were then filled in, and PCR amplification was performed using adaptor-specific primers. Only population (e), which contained tester cDNA that did not hybridize to driver cDNA, was amplified exponentially. A second PCR amplification step was then performed, to reduce background and further enrich differentially expressed sequences.

[4883] This PCR-based subtraction technique normalizes differentially expressed cDNAs so that r are transcripts that are overexpressed in pancreatic tumor tissue may be recoverable. Such transcripts would be difficult to recover by traditional subtraction methods.

[4884] The resulting PCR products were subcloned into the TA cloning vector, pCRII (Invitrogen, San Diego, Calif.) and transformed into ElectroMax E. coli DH10B cells (Gibco BRL Life, Technologies) by electroporation. DNA was isolated from independent clones and sequenced using a Perkin Elmer/Applied Biosystems Division (Foster City, Calif.) Automated Sequencer Model 373A.

[4885] Seventy three randomly selected cDNA clones in the subtracted pancreatic tumor-specific cDNA library were characterized by DNA sequencing and by subsequent Genbank and EST Blast database searches. Sequences of these partial cDNAs are provided in SEQ ID NO:456-528.

[4886] Three thousand seven hundred forty four randomly selected cDNA clones in the subtracted pancreatic tumor-specific cDNA library were characterized by DNA sequencing and by subsequent Genbank and EST Blast database searches. Sequences of these partial cDNAs are provided in SEQ ID NO:529-4346.

### Example 7

### Microarray and Sequence Analysis of cDNA Clones Overexpressed in Pancreas Tumors

[4887] One hundred thirty-eight individual clones analyzed using microarray technology as described in Example 2 showed between 3 to 4.5-fold overexpression in pancreas tumors as compared to normal tissues. These cDNA clones were sequenced using standard protocols and compared to public databases (SEQ ID NO:4347-4484). Those cDNAs that showed some degree of similarity to sequences in the databases are described in Table 7. Those cDNAs showing no significant similarity to known sequences in the database are described in Table 8.

TABLE 7
Pancreas Tumor cDNA Clones Showing Some Degree of Similarity to Sequences in Genbank

| SEQ ID | | | | Median | Median | | | |
|---|---|---|---|---|---|---|---|---|
| NO: | Element (384) | Element (96) | Ratio | Signal 1 | Signal 2 | Genset | Contig | Genbank |
| 4346 | p0150r10c11 | R0580 C6 | 4.18 | 0.341 | 0.082 | 61 | 1 | Secretogranin II (Chromogranin C) |
| 4347 | p0150r07c17 | R0579 E9 | 3.68 | 0.163 | 0.044 | 42 | 1 | Secretogranin II (Chromogranin C) |
| 4348 | p0150r09c15 | R0580 A8 | 3.63 | 0.236 | 0.065 | 53 | 1 | Secretogranin II (Chromogranin C) |
| 4349 | p0150r07c14 | R0579 F7 | 3.01 | 0.214 | 0.071 | 46 | 1 | Secretogranin II (Chromogranin C) |
| 4350 | p0150r11c05 | R0580 E3 | 4.38 | 0.096 | 0.022 | 66 | 1 | Secretogranin II (Chromogranin C) |
| 4351 | p0160r06c18 | R0619 D9 | 3.43 | 0.266 | 0.077 | 134 | 2 | Pancreatic Lipase |
| 4352 | p0160r02c21 | R0618 C11 | 3.6 | 0.202 | 0.056 | 133 | 2 | Pancreatic Lipase |
| 4353 | p0160r13c02 | R0621 B1 | 3.24 | 0.202 | 0.062 | 135 | 2 | Pancreatic Lipase |
| 4354 | p0150r13c04 | R0581 B2 | 3.66 | 0.188 | 0.051 | 84 | 3 | Secretogranin II (Chromogranin C) |
| 4355 | p0150r02c15 | R0578 C8 | 4.45 | 0.131 | 0.029 | 11 | 3 | Secretogranin II (Chromogranin C) |
| 4356 | P0150r06c12 | R0579 D6 | 3.02 | 0.274 | 0.091 | 39 | 4 | ATP binding cassette, subfamily B (MDR 1) |
| 4357 | p0151r06c12 | R0583 D6 | 3.4 | 0.112 | 0.033 | 104 | 5 | Human gene for JKTBP2, JKTBP1 |
| 4358 | P0150r14c04 | R0581 D2 | 3.17 | 0.161 | 0.051 | 87 | 6 | 26S proteasome regulatory subunit |
| 4359 | p0150r02c06 | R0578 D3 | 3.28 | 0.193 | 0.059 | 14 | 7 | Chromosome 5 CTC-487M23 |
| 4360 | p0150r04c19 | R0578 G10 | 3.91 | 0.192 | 0.049 | 23 | 8 | cDNA clone FLJ21238 fis, clone COL01115 |
| 4361 | p0150r03c18 | R0578 F9 | 3.94 | 0.163 | 0.041 | 22 | 9 | GTP cyclohydrolase 1 |
| 4362 | p0151r13c03 | R0585 A2 | 3.51 | 0.249 | 0.071 | 108 | 10 | Clone RP11-353C18 on chromosome 20 |
| 4363 | p0150r01c08 | R0578 B4 | 3.86 | 0.171 | 0.044 | 5 | 11 | Spectrin SH3 domain binding protein 1 |
| 4364 | p0150r11c07 | R0580 E4 | 3.02 | 0.143 | 0.048 | 67 | 12 | Human decay accelerating factor (CD55) gene |
| 4365 | P0150r02c11 | R0578 C6 | 3.33 | 0.148 | 0.045 | 10 | 13 | BAC clone GS1-66B6 7p15.2-p13 |
| 4366 | p0150r01c17 | R0578 A9 | 4.14 | 0.202 | 0.049 | 2 | 14 | RNA (guanine-7-) methyltransferase |
| 4367 | p0150r05c16 | R0579 B8 | 3.63 | 0.131 | 0.036 | 32 | 15 | Clone RP1-154G14 on chromosome 6q15-16.3 |
| 4368 | p0150r06c04 | R0579 D2 | 3.82 | 0.315 | 0.083 | 36 | 16 | Human sarcomeric muscle protein |
| 4369 | p0150r15c17 | R0581 E9 | 3.18 | 0.104 | 0.033 | 92 | 17 | Clone 20I3 on chromosome Xq25-26 |
| 4370 | p0150r15c11 | R0581 E6 | 3.47 | 0.147 | 0.043 | 91 | 18 | Human cytoplasmic dynein intermediate chain |
| | | | | | | | | isoform IC-2 |
| 4371 | p0150r09c13 | R0580 A7 | 3.9 | 0.143 | 0.037 | 52 | 19 | Human aldehyde dehydrogenase 1 |
| 4372 | p0150r13c03 | R0581 A2 | 3.14 | 0.222 | 0.071 | 80 | 20 | cDNA DKFZp434C2112 |
| 4373 | p0150r09c10 | R0580 B5 | 3.03 | 0.226 | 0.075 | 57 | 21 | Human RAD21 homolog |
| 4374 | p0161r13c17 | R0625 A9 | 3.39 | 0.217 | 0.064 | 136 | 22 | Pancreatic carboxypeptidase B1 |
| 4375 | p0159r16c21 | R0617 G11 | 4.1 | 0.2 | 0.049 | 132 | 23 | Human matix metalloproteinase 2 |
| 4377 | p0151r09c19 | R0584 A10 | 3.31 | 0.139 | 0.042 | 106 | 25 | Clone RP1-315G1 on chromosome Xq24-25 |
| 4378 | p0151r02c06 | R0582 D3 | 3.46 | 0.326 | 0.094 | 101 | 26 | cDNA FLJ20882 fis, clone ADKA03206 |
| 4379 | p0150r16c06 | R0581 H3 | 3.37 | 0.155 | 0.046 | 100 | 27 | Human potassium channel modulatory factor |
| 4380 | p0150r09c12 | R0580 B6 | 4 | 0.111 | 0.028 | 58 | 28 | Human proprotein convertase subtilisin/kexin |
| | | | | | | | | type 2 |
| 4381 | p0150r07c06 | R0579 F3 | 3.37 | 0.195 | 0.058 | 43 | 29 | KIAA0205 gene |
| 4382 | p0150r06c19 | R0579 C10 | 3.34 | 0.178 | 0.053 | 34 | 30 | Human thymidylate synthase |
| 4383 | p0150r04c05 | R0578 G3 | 3.72 | 0.218 | 0.059 | 24 | 31 | Clone RP11-179B15 |
| 4384 | p0150r03c21 | R0578 E11 | 4.17 | 0.2 | 0.048 | 18 | 32 | KIAA0970 protein |
| 4385 | p0150r15c07 | R0581 E4 | 3.83 | 0.102 | 0.027 | 90 | 33 | Human myosin X |
| 4386 | p0150r02c18 | R0578 D9 | 4.48 | 0.143 | 0.032 | 16 | 33 | Human myosin X |
| 4387 | p0150r10c15 | R0580 C8 | 4.46 | 0.247 | 0.056 | 62 | 34 | KIAA1360 protein |
| 4388 | p0150r07c05 | R0579 E3 | 3.12 | 0.135 | 0.043 | 40 | 35 | cDNA DKFZp586E2023 |
| 4389 | p0150r06c08 | R0579 D4 | 3.85 | 0.177 | 0.046 | 37 | 36 | Human hypothetical protein FLJ10134 |
| 4390 | p0150r01c24 | R0578 B12 | 3.74 | 0.18 | 0.048 | 4 | 37 | Human ALEX1 protein |
| 4391 | p0150r07c15 | R0579 E8 | 3.13 | 0.272 | 0.087 | 41 | 38 | Human tropomodulin |
| 4392 | p0150r02c23 | R0578 C12 | 4.34 | 0.163 | 0.037 | 8 | 39 | Human Kreisler maf-related leucine zipper |
| | | | | | | | | homolog |
| 4393 | p0151r09c08 | R0584 B4 | 4.44 | 0.393 | 0.089 | 107 | 40 | Human histone acetyltransferase |
| 4394 | p0150r16c09 | R0581 G5 | 3.55 | 0.238 | 0.067 | 95 | 41 | Human coronin, actin-binding protein 1C |
| 4395 | p0150r14c11 | R0581 C6 | 3.99 | 0.096 | 0.024 | 86 | 42 | cDNA DKFZp761G2423 |
| 4396 | p0151r05c12 | R0583 B6 | 3.49 | 0.221 | 0.063 | 103 | 43 | Human X-prolyl aminopeptidase-like |
| 4397 | p0150r12c23 | R0580 G12 | 4.06 | 0.14 | 0.034 | 75 | 44 | Clone RP4-758N20 on chromosome 1p31.3-32 |
| 4398 | p0150r16c02 | R0581 H1 | 3.09 | 0.093 | 0.03 | 98 | 45 | KIAA1228 protein |
| 4399 | p0155r10c08 | R0600 D4 | 3.07 | 0.245 | 0.08 | 121 | 46 | cDNA DKFZp586I1419 |
| 4400 | p0150r02c05 | R0578 C3 | 3.82 | 0.174 | 0.046 | 9 | 47 | Human uncharacterized hypothalamus protein |
| | | | | | | | | HARP11 |
| 4401 | p0150r09c04 | R0580 B2 | 3.09 | 0.197 | 0.064 | 55 | 48 | Human aldehyde dehydrogenase 1 |
| 4402 | p0150r03c22 | R0578 F11 | 3.45 | 0.133 | 0.039 | 21 | 49 | Human secretory granule, neuroendocrine |
| | | | | | | | | protein 1 |
| 4403 | p0150r15c10 | R0581 F5 | 3.1 | 0.111 | 0.036 | 94 | 50 | Human I-beta-1,3-N-acetylglucosaminyltransferase |
| 4404 | p0150r13c20 | R0581 B10 | 3.94 | 0.111 | 0.028 | 82 | 51 | Human 12p13.3 BAC RPCI11-350L7 |
| 4405 | p0150r08c18 | R0579 H9 | 3.35 | 0.173 | 0.052 | 49 | 52 | Human tumor differentially expressed 1 |
| 4406 | p0150r09c22 | R0580 B11 | 3.39 | 0.195 | 0.057 | 54 | 53 | Human deoxycytidine kinase |
| 4408 | p0163r04c09 | R0630 G5 | 3 | 0.283 | 0.094 | 138 | 55 | Human hypothetical protein FLJ10540 |
| 4409 | p0155r01c04 | R0598 B2 | 4.2 | 0.377 | 0.09 | 116 | 56 | Human collagen, type III, alpha 1 |
| 4410 | p0152r16c22 | R0589 H11 | 3.74 | 0.363 | 0.097 | 113 | 57 | Human transmembrane 4 superfamily member 4 |
| | | | | | | | | (TM4SF4) |
| 4411 | p0152r16c12 | R0589 H6 | 3.09 | 0.292 | 0.095 | 114 | 58 | Human chloride intracellular channel 1 |
| 4413 | p0150r05c23 | R0579 A12 | 4.1 | 0.189 | 0.046 | 27 | 60 | Human N33 protein form 2 |
| 4414 | p0150r11c09 | R0580 E5 | 3.16 | 0.191 | 0.06 | 68 | 61 | Human hypothetical protein (FLJ11127) |
| 4415 | p0150r13c22 | R0581 B11 | 3.1 | 0.12 | 0.039 | 83 | 62 | DNA sequence from clone 422G23 on |
| | | | | | | | | chromosome 6q24 |
| 4416 | p0150r11c17 | R0580 E9 | 3.66 | 0.244 | 0.067 | 70 | 63 | cDNA FLJ20935 fis, clone ADSE01534 |
| 4417 | p0159r16c01 | R0617 G1 | 4.4 | 0.183 | 0.042 | 131 | 64 | Human carboxypeptidase A2 |
| 4418 | p0156r16c21 | R0605 G11 | 3.37 | 0.206 | 0.061 | 122 | 65 | Human guanine nucleotide exchange factor |
| 4419 | p0150r06c15 | R0579 C8 | 3.21 | 0.168 | 0.052 | 35 | 66 | Human chromosome 5 clone CTC-315O24 |
| 4422 | p0150r11c22 | R0580 F11 | 4.29 | 0.17 | 0.04 | 72 | 69 | Human RNA helicase II/Gu protein gene |
| 4425 | p0150r11c02 | R0580 F1 | 3.65 | 0.207 | 0.057 | 71 | 72 | Human carboxypeptidase E |
| 4426 | p0157r07c21 | R0607 E11 | 3.88 | 0.192 | 0.049 | 126 | 73 | Human cutaneous T-cell lymphoma tumor |
| | | | | | | | | antigen se70-2 |
| 4427 | p0150r16c17 | R0581 G9 | 3.28 | 0.101 | 0.031 | 97 | 74 | KIAA0393 protein |
| 4428 | p0155r03c08 | R0598 F4 | 3.25 | 0.305 | 0.094 | 117 | 75 | Human laminin, gamma 2 |
| 4429 | p0150r07c10 | R0579 F5 | 3.27 | 0.223 | 0.068 | 44 | 76 | Human chromosome 5 clone CTC-576H9 |
| 4430 | p0150r16c13 | R0581 G7 | 3.58 | 0.166 | 0.046 | 96 | 77 | Clone RP11-71J12 on chromosome 13 |
| 4431 | p0150r06c10 | R0579 D5 | 3.05 | 0.243 | 0.08 | 38 | 78 | Human 3q26.2-27 BAC RPCI11-469J4 |
| 4432 | p0150r02c16 | R0578 D8 | 4.47 | 0.11 | 0.025 | 15 | 79 | Human potassium inwardly-rectifying channel, |
| | | | | | | | | subfamily J |
| 4433 | p0150r09c06 | R0580 B3 | 4.25 | 0.176 | 0.042 | 56 | 80 | KIAA1699 protein |
| 4434 | p0150r11c16 | R0580 F8 | 3.49 | 0.178 | 0.051 | 74 | 81 | Human somatostatin receptor 2 |
| 4435 | p0150r01c13 | R0578 A7 | 4.49 | 0.411 | 0.092 | 1 | 82 | Humna claudin-12 |
| 4436 | p0150r08c10 | R0579 H5 | 3.29 | 0.238 | 0.073 | 48 | 83 | Human tumor rejection antigen (gp96) 1 |
| 4438 | p0159r14c18 | R0617 D9 | 3.07 | 0.101 | 0.033 | 130 | 85 | Human carboxypeptidase A2 |
| 4439 | p0150r16c22 | R0581 H11 | 3.09 | 0.304 | 0.098 | 99 | 86 | Human cDNA FLJ12280 fis clone |
| | | | | | | | | MAMMA1001744 |
| 4440 | p0152r10c20 | R0588 D10 | 4.4 | 0.157 | 0.036 | 110 | 87 | Human guanine nucleotide-binding protein alpha- |
| | | | | | | | | subunit |
| 4441 | p0150r13c23 | R0581 A12 | 3.48 | 0.248 | 0.071 | 79 | 88 | Human nuclear factor kappa-B DNA binding |
| | | | | | | | | subunit |
| 4442 | p0150r12c10 | R0580 H5 | 3.7 | 0.158 | 0.043 | 78 | 89 | Human CD164 isoform delta 4 |
| 4443 | p0150r09c18 | R0580 B9 | 3.67 | 0.214 | 0.058 | 59 | 90 | Human galectin-8 gene |
| 4444 | p0158r09c04 | R0612 B2 | 4.14 | 0.14 | 0.034 | 129 | 91 | Human cathepsin C |
| 4445 | p0150r08c09 | R0579 G5 | 3.69 | 0.226 | 0.061 | 47 | 92 | Human imidazoline receptor candidate |
| 4446 | p0150r11c11 | R0580 E6 | 4.15 | 0.237 | 0.057 | 69 | 93 | Human glutaminase isoform C |
| 4447 | p0150r15c01 | R0581 E1 | 4.12 | 0.099 | 0.024 | 88 | 94 | Human chromosome 5 clone CTD-2314G24 |
| 4448 | p0157r07c01 | R0607 E1 | 3.67 | 0.254 | 0.069 | 125 | 95 | DNA from chromosome 19, cosmid F21856 |
| 4449 | p0150r09c21 | R0580 A11 | 3.49 | 0.169 | 0.048 | 51 | 96 | Human false p73 target protein gene |
| 4450 | p0150r12c02 | R0580 H1 | 3.31 | 0.173 | 0.052 | 76 | 97 | cDNA FLJ12946 fis, clone NT2RP2005254 |
| 4451 | p0150r03c17 | R0578 E9 | 4.16 | 0.212 | 0.051 | 20 | 98 | cDNA DKFZp434L1715 |
| 4453 | p0150r05c20 | R0579 B10 | 3.43 | 0.147 | 0.043 | 29 | 100 | Human large conductance calcium-activated |
| | | | | | | | | potassium channel beta |
| 4454 | p0150r05c04 | R0579 B2 | 3.01 | 0.1 | 0.033 | 31 | 101 | Human prostate tumor over expressed gene 1 |
| 4455 | p0150r07c12 | R0579 F6 | 3.59 | 0.191 | 0.053 | 45 | 102 | Human alpha-L-fucosidase gene |
| 4456 | p0150r05c02 | R0579 B1 | 3.15 | 0.205 | 0.065 | 28 | 103 | Human N-terminal acetyltransferase complex |
| | | | | | | | | ard1 subunit |
| 4457 | p0152r13c24 | R0589 B12 | 3.44 | 0.207 | 0.06 | 111 | 104 | Chromosome 19, cosmid F23669 |
| 4458 | p0150r03c11 | R0578 E6 | 3.05 | 0.159 | 0.052 | 19 | 105 | Human IK cytokine, down-regulator of HLA II |
| 4459 | p0162r13c11 | R0629 A6 | 3.07 | 0.133 | 0.043 | 137 | 106 | Human thrombospondin 2 |
| 4460 | p0151r13c15 | R0585 A8 | 3.71 | 0.171 | 0.046 | 109 | 107 | cDNA FLJ23160 fis, clone LNG09682 |
| 4461 | p0150r03c01 | R0578 E1 | 4.03 | 0.145 | 0.036 | 17 | 108 | Human Na+/glucose cotransporter gene |
| 4462 | p0151r08c17 | R0583 G9 | 3.57 | 0.131 | 0.037 | 105 | 109 | Human death-associated protein |
| 4463 | p0150r01c02 | R0578 B1 | 3.1 | 0.287 | 0.093 | 3 | 110 | Human guanine nucleotide binding protein |
| 4464 | p0150r04c06 | R0578 H3 | 3.93 | 0.158 | 0.04 | 25 | 111 | Clone RP4-813B7 on chromosome 1 |
| 4465 | p0150r09c19 | R0580 A10 | 3.86 | 0.197 | 0.051 | 50 | 112 | Human mitochondrion |
| 4466 | p0153r06c10 | R0591 D5 | 3.78 | 0.294 | 0.078 | 115 | 113 | Human DEAD/H box polypeptide 5 |
| 4467 | p0150r02c20 | R0578 D10 | 3.82 | 0.198 | 0.052 | 13 | 114 | KIAA1317 protein |
| 4468 | p0155r09c08 | R0600 B4 | 4.13 | 0.393 | 0.095 | 118 | 115 | KIAA0883 protein |
| 4471 | p0150r13c02 | R0581 B1 | 3.13 | 0.163 | 0.052 | 81 | 117 | RNA binding motif protein 5 |
| 4473 | p0150r11c23 | R0580 E12 | 3.57 | 0.237 | 0.067 | 65 | 119 | Human GTP cyclohydrolase 1 |
| 4474 | p0155r10c24 | R0600 D12 | 3.55 | 0.205 | 0.058 | 120 | 120 | Human mitochondrial DNA control region |
| 4475 | p0157r06c03 | R0607 C2 | 4.14 | 0.172 | 0.042 | 124 | 121 | Ras-related C3 botulinum toxin substrate 1 |
| 4476 | p0150r05c24 | R0579 B12 | 3.83 | 0.157 | 0.041 | 30 | 122 | Human hypothetical protein FLJ20391 |
| 4479 | p0155r10c19 | R0600 C10 | 3.73 | 0.274 | 0.073 | 119 | 125 | KIAA0292 protein |
| 4480 | p0150r14c23 | R0581 C12 | 3.51 | 0.14 | 0.04 | 85 | 126 | ISL1 transcription factor, LIM/homeodomain |
| 4481 | p0150r10c19 | R0580 C10 | 3.56 | 0.188 | 0.053 | 60 | 127 | KIAA0766 gene |
| 4482 | p0150r11c19 | R0580 E10 | 3.28 | 0.152 | 0.046 | 63 | 128 | KIAA1554 protein |
| 4483 | p0150r15c21 | R0581 E11 | 3.25 | 0.114 | 0.035 | 89 | 129 | Chromosome 11p14.3 PAC clone pDJ239b22 |
| 4484 | p0150r11c21 | R0580 E11 | 3.07 | 0.165 | 0.054 | 64 | 130 | Clone RP1-309F20 on chromosome 20 |
| 4412 | p0150r01c16 | R0578 B8 | 3.06 | 0.242 | 0.079 | 7 | 59 | Human thyroid hormone receptor coactivating |
| | | | | | | | | protein |

[4888] TABLE 8
Pancreas Tumor cDNAs Showing no Significant
Similarity to Known Sequences in Genbank

| SEQ ID | | | | Median | Median | | |
|---|---|---|---|---|---|---|---|
| NO: | Element (384) | Element (96) | Ratio | Signal 1 | Signal 2 | Genset | Contig |
| 4376 | p0150r02c02 | R0578 D1 | 3.62 | 0.193 | 0.053 | 12 | 24 |
| 4407 | p0157r08c09 | R0607 G5 | 3.18 | 0.155 | 0.049 | 128 | 54 |
| 4420 | p0151r05c04 | R0583 B2 | 3.01 | 0.145 | 0.048 | 102 | 67 |
| 4421 | p0150r05c21 | R0579 A11 | 3.4 | 0.217 | 0.064 | 26 | 68 |
| 4423 | p0150r01c14 | R0578 B7 | 3.67 | 0.19 | 0.052 | 6 | 70 |
| 4424 | p0150r15c08 | R0581 F4 | 3.06 | 0.111 | 0.036 | 93 | 71 |
| 4437 | p0150r05c18 | R0579 B9 | 3.98 | 0.164 | 0.041 | 33 | 84 |
| 4452 | p0157r07c20 | R0607 F10 | 3.09 | 0.158 | 0.051 | 127 | 99 |
| 4469 | p0152r16c01 | R0589 G1 | 3.13 | 0.242 | 0.077 | 112 | 116 |
| 4471 | p0150r12c22 | R0580 H11 | 4 | 0.15 | 0.037 | 77 | 118 |
| 4476 | p0150r11c04 | R0580 F2 | 4.03 | 0.175 | 0.043 | 73 | 123 |
| 4477 | p0156r16c18 | R0605 H9 | 3.03 | 0.201 | 0.066 | 123 | 124 |

### Example 8

### Microarray and Sequence Analysis of Additional cDNA Clones Overexpressed in Pancreas Tumors

[4889] Forty eight hundred clones from three PCR-based subtracted cDNA libraries were PCR amplified and arrayed on DNA chips. They were hybridized with fluorescently labeled probes which were generated from pancreatic tumors and a varity of normal tissues including normal pancreas. The array data were analyzed by computer and by visual analysis. Sixty-three clones with 4.5-fold overexpression in pancreatic tumors were selected their sequences were determined by DNA sequencing (SEQ ID NO:44854547). The sequences were then searched against public databases including Genbank and EST. Those cDNAs that showed some degree of similarity to sequences in the databases are described in Table 9. Those cDNAs showing no significant similarity to known sequences in the database are described in Table 10. Several of these cDNAs have been selected as promising candidates for therapeutic and diagnostic purposes. The candidate names are also shown in Tables 9 and 10.

TABLE 9
Additional Pancreas Tumor cDNA Clones Showing Some Degree of Similarity to Sequences in the Genbank

| SEQ ID | | | | Median | Median | | | |
|---|---|---|---|---|---|---|---|---|
| NO: | Element (384) | Element (96) | Ratio | Signal 1 | Signal 2 | Contig | Identity | Candidate |
| 4533 | p0157r07c23 | R0607 E12 | 15.8 | 0.097 | 0.006 | 46 | BAC clone CTA-271G13 from 7 | |
| 4518 | p0157r05c17 | R0607 A9 | 16.36 | 0.169 | 0.01 | 31 | cDNA FLJ12849 fis, clone NT2RP2003393 | |
| 4506 | p0150r09c01 | R0580 A1 | 9.73 | 0.106 | 0.011 | 19 | cDNA FLJ21368 fis, clone COL03056 | |
| | | | | | | | Glutaminase isoform C | |
| 4519 | p0157r07c13 | R0607 E7 | 46.35 | 0.12 | 0.003 | 32 | cDNA FLJ21410 fis, clone COL03938 | |
| 4521 | p0157r07c15 | R0607 E8 | 12.34 | 0.137 | 0.011 | 34 | cDNA FLJ23607 fis, clone LNG16050 | Pn1474P |
| 4507 | p0150r08c17 | R0579 G9 | 5.2 | 0.137 | 0.026 | 20 | Chromogranin B | Pn1468P |
| 4514 | p0150r12c08 | R0580 H4 | 7.88 | 0.046 | 0.006 | 27 | Chromosome 12 clone 917O5 | |
| 4524 | p0152r06c10 | R0587 D5 | 11.83 | 0.038 | 0.003 | 37 | Chromosome 5 clone CTC-534A2 | |
| 4509 | p0150r09c20 | R0580 B10 | 6.1 | 0.131 | 0.021 | 22 | Chromosome 5 clone CTD-2031P19 | |
| 4500 | p0150r11c01 | R0580 E1 | 6.34 | 0.14 | 0.022 | 13 | Chromosome 5 clone CTD-2122K7 | Pn1469P |
| 4523 | p0155r07c16 | R0599 F8 | 4.7 | 0.107 | 0.023 | 36 | Chromosome 7 clone RP11-248K17 | |
| | | | | | | | Caldesmon, 3′ UTR | |
| 4487 | p0157r07c17 | R0607 E9 | 8.97 | 0.148 | 0.017 | 4 | Clone 27K12 on chromosome 6p11.2-12.3 | |
| 4539 | p0157r07c09 | R0607 E5 | 5.64 | 0.262 | 0.046 | | Clone RP1-122P22 on chromosome 20 | Pn1473P |
| 4501 | p0150r03c14 | R0578 F7 | 9.86 | 0.138 | 0.014 | 14 | Clone RP11-239L20 on chromosome 6 | |
| 4529 | p0157r05c18 | R0607 B9 | 24.3 | 0.174 | 0.007 | 42 | Discoidin domain receptor family. Human | Pn1472P |
| | | | | | | | mammary carcinoma kinase | |
| 4498 | p0150r02c07 | R0578 C4 | 4.99 | 0.264 | 0.053 | 11 | DKFZp434M1616 | |
| 4508 | p0150r09c17 | R0580 A9 | 16.97 | 0.121 | 0.007 | 21 | Guanine nucleotide binding protein | |
| | | | | | | | (neuroendocrine secretory protein 55) | |
| 4510 | p0150r08c06 | R0579 H3 | 5.32 | 0.113 | 0.021 | 23 | Hormone-regulated Repro-PC 1.0 gene | |
| | | | | | | | Reprogen Inc. KIAA1342 | |
| 4537 | p0151r12c17 | R0584 G9 | 5.37 | 0.937 | 0.174 | | Human breast tumor protein immunogenic | |
| | | | | | | | fragment | |
| 4513 | p0150r11c03 | R0580 E2 | 19.29 | 0.096 | 0.005 | 26 | Human CGI-86 protein | |
| 4546 | p0157r07c06 | R0607 F3 | 16.6 | 0.18 | 0.011 | | Human clone PP722 unknown mRNA | |
| 4540 | p0157r08c05 | R0607 G3 | 20.8 | 0.353 | 0.017 | | Human colon cancer nucleotide sequence, NCA | Pn1475P |
| 4526 | p0150r02c03 | R0578 C2 | 5.65 | 0.166 | 0.029 | 39 | Human decidual protein induced by | |
| | | | | | | | progesterone | |
| 4517 | p0150r15c23 | R0581 E12 | 7.72 | 0.143 | 0.019 | 30 | Human desmoplakin | |
| 4530 | p0157r06c17 | R0607 C9 | 8.13 | 0.222 | 0.027 | 43 | Human filamin gene (FLNB) | |
| 4504 | p0150r01c04 | R0578 B2 | 10.45 | 0.095 | 0.009 | 17 | Human foetal brain secreted protein | |
| 4534 | p0150r01c20 | R0578 B10 | 4.82 | 0.295 | 0.061 | | Human Hexosaminidase B beta-subunit | |
| 4496 | p0150r07c01 | R0579 E1 | 8.7 | 0.107 | 0.012 | 9 | Human HLA gene for MHC class I antigen, | |
| | | | | | | | B4701 allele MDM2 gene | |
| 4484 | p0157r05c22 | R0607 B11 | 8.32 | 0.211 | 0.025 | 1 | Human long-chain fatty acid coenzyme A ligase | |
| | | | | | | | 5 | |
| 4488 | p0150r15c22 | R0581 F11 | 9.35 | 0.115 | 0.012 | 5 | Human putative helicase RUVBL (LOC56897) | |
| 4511 | p0150r13c19 | R0581 A10 | 5.09 | 0.217 | 0.043 | 24 | Human PVR gene | |
| 4503 | p0150r04c17 | R0578 G9 | 6.29 | 0.404 | 0.064 | 16 | Human secreted protein gene 79 | Pn1467P |
| 4582 | p0150r11c14 | R0580 F7 | 31.67 | 0.1 | 0.003 | 41 | Human secretory granule, neuroendocrine | |
| | | | | | | | protein 1 | |
| 4485 | p0157r05c21 | R0607 A11 | 5.18 | 0.149 | 0.029 | 2 | Human sucrase-isomaltase | |
| 4531 | p0157r07c18 | R0607 F9 | 38.09 | 0.183 | 0.005 | 44 | Human transgelin | |
| 4544 | p0162r02c05 | R0626 C3 | 5.16 | 0.434 | 0.084 | | hXAG | |
| 4486 | p0157r06c05 | R0607 C3 | 9.62 | 0.128 | 0.013 | 3 | KIAA0071 | |
| 4527 | p0150r06c24 | R0579 D12 | 4.75 | 0.112 | 0.024 | 40 | KIAA0804 | |
| 4516 | p0150r09c11 | R0580 A6 | 5.32 | 0.227 | 0.043 | 29 | KIAA1289 | |
| 4541 | p0157r08c17 | R0607 G9 | 5.59 | 0.213 | 0.038 | | Malate dehydrogenase 2, NAD | |
| 4495 | p0150r05c19 | R0579 A10 | 11.78 | 0.112 | 0.01 | 9 | MDM2 gene | |
| 4536 | p0150r15c06 | R0581 F3 | 6.86 | 0.227 | 0.033 | | Neuroendocrine secretory protein 55 | |
| 4489 | p0159r03c13 | R0614 E7 | 5.97 | 0.549 | 0.092 | 6 | Pancreatic lipase | |
| 4490 | p0160r04c18 | R0618 H9 | 4.68 | 0.374 | 0.08 | 6 | Pancreatic lipase | |
| 4545 | p0157r06c24 | R0607 D12 | 18.84 | 0.157 | 0.008 | | Pro alpha 1 (I) collagen | |
| 4515 | p0150r05c22 | R0579 B11 | 4.63 | 0.187 | 0.04 | 28 | PRO2000 protein | |
| 4520 | p0157r07c14 | R0607 F7 | 26.74 | 0.149 | 0.006 | 33 | Protein identified by the signal sequence trap | |
| | | | | | | | polyA site DNA | |
| 4543 | p0161r16c06 | R0625 H3 | 5.96 | 1.13 | 0.19 | | Regenerating islet-derived 1 beta | |
| 4491 | p0150r06c23 | R0579 C12 | 4.79 | 0.133 | 0.028 | 7 | RP11-287F15 chromosome 9 | |
| 4492 | p0150r02c15 | R0578 C8 | 4.45 | 0.131 | 0.029 | 7 | RP11-287F15 chromosome 9 | |
| 4493 | p0150r13c24 | R0581 B12 | 6.41 | 0.138 | 0.021 | 8 | Secretogranin II | |
| 4494 | p0150r15c03 | R0581 E2 | 6.13 | 0.129 | 0.021 | 8 | Secretogranin II | |
| 4502 | p0150r02c12 | R0578 D6 | 6.07 | 0.149 | 0.025 | 15 | Secretogranin II | |
| 4505 | p0150r02c22 | R0578 D11 | 5.65 | 0.147 | 0.026 | 18 | Secretogranin II | |

[4890] TABLE 10
Additional Pancreas Tumor cDNAs Showing no Significant
Similarity to Known Sequences in Genbank

| | | | | Median | Median | | |
|---|---|---|---|---|---|---|---|
| SEQ ID NO: | Element (384) | Element (96) | Ratio | Signal 1 | Signal 2 | Contig | Candidate |
| 4497 | p0150r06c16 | R0579 D8 | 4.93 | 0.105 | 0.021 | 10 | |
| 4499 | p0152r15c23 | R0589 E12 | 4.91 | 0.186 | 0.038 | 12 | Pn1471P |
| 4512 | p0150r12c09 | R0580 G5 | 4.6 | 0.083 | 0.018 | 25 | |
| 4522 | p0151r01c08 | R0582 B4 | 5.1 | 0.158 | 0.031 | 35 | |
| 4525 | p0150r04c18 | R0578 H9 | 5.3 | 0.145 | 0.027 | 38 | |
| 4532 | p0157r06c08 | R0607 D4 | 11.23 | 0.093 | 0.008 | 45 | |
| 4535 | p0150r14c15 | R0581 C8 | 5.19 | 0.102 | 0.02 | | Pn1470P |
| 4538 | p0155r12c15 | R0600 G8 | 5.35 | 0.772 | 0.145 | | |
| 4542 | p0160r03c01 | R0618 E1 | 4.73 | 0.489 | 0.104 | | Pn1476P |

### Example 9

### Quantitative Real-Time PCR Analysis of cDNA Clones Overexpressed in Pancreatic Tumors

[4891] Four pancreas clones selected by cDNA microarray and subtracted cDNA library as described in Examples 2 and 6-8 were analyzed by real-time PCR to confirm their expression level in a varity of tissues. Pancreatic tumors and normal pancreas tissues along with other normal tissues were tested in quantitative real-time PCR. Briefly, the first-strand cDNA was synthesized from 20 μg of total RNA that had been treated with DNase I (Amplification Grade, Gibco BRL Life Technology, Gaitherburg, Md.), using Superscript Reverse Transcriptase (RT) (Gibco BRL Life Technology, Gaitherburg, Md.). Real-time PCR was performed with a GeneAmp™ 5700 sequence detection system (PE Biosystems, Foster City, Calif.). The 5700 system uses SYBR™ green, a fluorescent dye that only intercalates into double stranded DNA, and a set of gene-specific forward and reverse primers. The increase in fluorescence is monitored during the whole amplification process. The optimal concentration of primers was determined using a checkerboard approach and a pool of cDNAs from pancreas tumors was used in this process. The PCR reaction was performed in 25 μl volumes that include 2.5μl of SYBR green buffer, 2 μl of cDNA template and 2.5μl each of the forward and reverse primers for the gene of interest. The cDNAs used for RT reactions were diluted 1:10 for each gene of interest and 1:100 for the β-actin control. In order to quantitate the amount of specific cDNA (and hence initial mRNA) in the sample, a standard curve is generated for each run using the plasmid DNA containing the gene of interest. Standard curves were generated using the Ct values determined in the real-time PCR which were related to the initial cDNA concentration used in the assay. Standard dilution ranging from 20-2×10⁶ copies of the gene of interest was used for this purpose. In addition, a standard curve was generated for β-actin ranging from 200fg-2000fg. This enabled standardization of the initial RNA content of a tissue sample to the amount of β-actin for comparison purposes. The mean copy number for each group of tissues tested was normalized to a constant amount of β-actin, allowing the evaluation of the over-expression levels seen with each of the genes.

[4892] Pn1467P (SEQ ID NO:4503) was found to be over-expressed in grade IV pancreas tumors and the majority of grade III tumors. Moderate expression was observed in grade II tumors, normal pancreas, and in most normal tissues. Over-expression of Pn1470P (SEQ ID NO:4535) was seen in grade III tumors and normal pancreas. Moderate expression of this gene was observed in grade IV tumors. Over-expression was also seen in bronchus. Low to moderate expression was observed in gall bladder, PBMC, stomach testis, and thymus. Pn1475P (SEQ ID NO:4540) was over-expressed in grades II-IV pancreas tumors and expressed at a low level in normal pancreas. Expression was not seen in metastatic tumors or in pancreatitis. Some Pn1475P expression was observed in bronchus, colon, esophagus, gall bladder, lung, salivary gland, small intestine, stomach, and trachea. Pn1476 (SEQ ID NO:4542) was overexpressed in 4 of 11 grade III tumors, 1 grade II, and I grade IV tumor. It was also overexpressed in 3 of 4 normal pancreas samples. No expression of this gene was observed in any normal tissues. Thus, this candidate will be valuable for both vaccine and diagnostic purposes. Pn1468P (SEQ ID NO:4507) was over-expressed in pancreas tumor metastases but not in other pancreas tumors. Over-expression was also observed in adrenal gland and pituitary, but was absent from all other normal tissues. Pn1473P (SEQ ID NO:4539) was highly over-expressed in pancreas tumor sample T795A. It was also over-expressed in 1 of 3 grade II pancreas tumor samples, 2 of 6 grade 4 tumor samples, and 7 of 11 grade III tumor samples. It was also over-expressed in tumor metastases but was not expressed in normal pancreas tissue. Pn1473P expression was also observed in skeletal muscle, stomach, testis, and trachea. The expression profiles of all of these candidate genes suggest that they will be valuable for therapeutic vaccine and/or diagnostic purposes.

### Example 10

### Full Length cDNA and Protein Sequence for 4 Antigens Overexpressed in Pacreatic Tumors

[4893] The sequences for Pn1468P, Pn1472P, and Pn1475P (SEQ ID NOs:4507, 4529, 4540, respectively), shown to be overexpressed in pancreas tumor samples, were searched against Genbank and the full length sequences identified. The full length sequences from Genbank are set forth in SEQ ID NOs:4548, 4549, and 4550, respectively. The corresponding protein sequences are set forth in SEQ ID NOs:4552-4554. The sequence for Pn1467, also overexpressed in pancreas tumor samples, was searched against the Genseq database and the full length sequence identified. The full length cDNA sequence from Genseq is set forth in SEQ ID NO:4547 and the corresponding protein sequence is set forth in SEQ ID NO:4551.

### Example 11

### Full Length cDNA and Protein Sequence for 2 Antigens Overexpressed in Pacreatic Tumors

[4894] Disclosed herein are the full-length DNA and protein sequences for the Pn1509P and Pn1510P antigens, both overexpressed in pancreatic tumors as compared to normal tissues.

[4895] A partial sequence for Pn1509P was shown to be overexpressed by 3.74 fold in pancreatic tumors as compared to normal tissues (see SEQ ID NO:4410, Table 2). The full-length DNA sequence for Pn1509P was identified by searching the 493 base pair fragment of Pn1509P set forth in SEQ ID NO:4410 against the Genbank database. The full-length extended DNA sequence for Pn1509P (identified in GenBank accession number NM 004617) is set forth in SEQ ID NO:4555 and the corresponding protein is set forth in SEQ ID NO:4558 . Based on sequence analysis, Pn1509 is predicted to be a tetraspan protein (it has four predicted membrane spanning domains) and has two potential sites for N-linked glycosylation.

[4896] A partial sequence for Pn1510P was shown to be overexpressed by 3.03 fold in pancreatic tumors as compared to normal tissues (see SEQ ID NO:4477, Table 2). The partial Pn1510P sequence set forth in SEQ ID NO:4477 was used in a search of the GeneSeq DNA database and matched 5 GeneSeq DNA records: A26456, A37144, A26424, V84525, and T22133. When the 5 protein coding regions of these DNA sequences were aligned using the DNAStar Seqman program, it was found that record A37144 had an additional C at position 35. This resulted in a 243 amino acid ORF. In the absence of this C at position 35, the DNA sequence encodes a 278 amino acid ORF. Disclosed herein are the DNA sequences that encode for both the 243 amino acid ORF and the 278 amino acid ORF (SEQ ID NOs:4556 and 4557, respectively). Also disclosed herein are the protein sequences for the 243 (Pn1510P-243) and 278 (Pn1510P-278) amino acid ORFs (SEQ ID NOs:4559 and 4560, respectively). In addition, transmembrane prediction programs were run to determine whether or not the Pn1510 protein may contain a transmembrane domain. Analysis of the Pn1510P-278 and Pn1510P-243 amino acid sequences using the PSORT and PSORTII programs revealed no potential transmembrane domains. However, analysis of these 2 protein sequences using a transmembrane prediction program identified a stretch of 20 hydrophobic amino acids, suggesting a possible transmembrane domain. This transmembrane domain occurs at amino acids 233-252 of the Pn150P-278 ORF and at amino acids 198-217 of the Pn1510P-243 ORF.

### Example 12

### Synthesis of Peptides

[4897] Polypeptides are synthesized on a Perkin Elmer/Applied Biosystems Division 430A peptide synthesizer using FMOC chemistry with HPTU (O-Benzotriazole-N,N,N′,N′-tetramethyluronium hexafluorophosphate) activation. A Gly-Cys-Gly sequence is attached to the amino terminus of the peptide to provide a method of conjugation, binding to an immobilized surface, or labeling of the peptide. Cleavage of the peptides from the solid support is carried out using the following cleavage mixture: trifluoroacetic acid:ethanedithiol:thioanisole:water:phenol (40:1:2:2:3). After cleaving for 2 hours, the peptides are precipitated in cold methyl-t-butyl-ether. The peptide pellets are then dissolved in water containing 0.1% trifluoroacetic acid (TFA) and lyophilized prior to purification by C18 reverse phase HPLC. A gradient of 0%-60% acetonitrile (containing 0.1% TFA) in water (containing 0.1% TFA) is used to elute the peptides. Following lyophilization of the pure fractions, the peptides are characterized using electrospray or other types of mass spectrometry and by amino acid analysis.

### Example 13

### Peptide Priming of T-Helper Lines

[4898] Generation of CD4⁺ T helper lines and identification of peptide epitopes derived from tumor-specific antigens that are capable of being recognized by CD4⁺ T cells in the context of HLA class II molecules, is carried out as follows:

[4899] Fifteen-mer peptides overlapping by 10 amino acids, derived from a tumor-specific antigen, are generated using standard procedures. Dendritic cells (DC) are derived from PBMC of a normal donor using GM-CSF and IL-4 by standard protocols. CD4⁺ T cells are generated from the same donor as the DC using MACS beads (Miltenyi Biotec, Auburn, Calif.) and negative selection. DC are pulsed overnight with pools of the 15-mer peptides, with each peptide at a final concentration of 0.25 μg/ml. Pulsed DC are washed and plated at 1×10⁴ cells/well of 96-well V-bottom plates and purified CD4⁺ T cells are added at 1×10⁵/well. Cultures are supplemented with 60 ng/ml IL-6 and 10 ng/ml IL-12 and incubated at 37° C. Cultures are restimulated as above on a weekly basis using DC generated and pulsed as above as antigen presenting cells, supplemented with 5 ng/ml IL-7 and 10 U/ml IL-2. Following 4 in vitro stimulation cycles, resulting CD4⁺ T cell lines (each line corresponding to one well) are tested for specific proliferation and cytokine production in response to the stimulating pools of peptide with an irrelevant pool of peptides used as a control.

### Example 14

### Generation of Tumor-Specific CTL Lines Using in vitro Whole-Gene Priming

[4900] Using in vitro whole-gene priming with tumor antigen-vaccinia infected DC (see, for example, Yee et al, The Journal of Immunology, 157(9):4079-86, 1996), human CTL lines are derived that specifically recognize autologous fibroblasts transduced with a specific tumor antigen, as determined by interferon-γ ELISPOT analysis. Specifically, dendritic cells (DC) are differentiated from monocyte cultures derived from PBMC of normal human donors by growing for five days in RPMI medium containing 10% human serum, 50 ng/ml human GM-CSF and 30 ng/ml human IL-4. Following culture, DC are infected overnight with tumor antigen-recombinant vaccinia virus at a multiplicity of infection (M.O.I) of five, and matured overnight by the addition of 3 μg/ml CD40 ligand. Virus is then inactivated by UV irradiation. CD8+ T cells are isolated using a magnetic bead system, and priming cultures are initiated using standard culture techniques. Cultures are restimulated every 7-10 days using autologous primary fibroblasts retrovirally transduced with previously identified tumor antigens. Following four stimulation cycles, CD8+ T cell lines are identified that specifically produce interferon-γ when stimulated with tumor antigen-transduced autologous fibroblasts. Using a panel of HLA-mismatched B-LCL lines transduced with a vector expressing a tumor antigen, and measuring interferon-γ production by the CTL lines in an ELISPOT assay, the HLA restriction of the CTL lines is determined.

### Example 15

### Generation and Characterization of Anti-Tumor Antigen Monoclonal Antibodies

[4901] Mouse monoclonal antibodies are raised against E. coli derived tumor antigen proteins as follows: Mice are immunized with Complete Freund's Adjuvant (CFA) containing 50 μg recombinant tumor protein, followed by a subsequent intraperitoneal boost with Incomplete Freund's Adjuvant (IFA) containing 10 μg recombinant protein. Three days prior to removal of the spleens, the mice are immunized intravenously with approximately 50 μg of soluble recombinant protein. The spleen of a mouse with a positive titer to the tumor antigen is removed, and a single-cell suspension made and used for fusion to SP2/O myeloma cells to generate B cell hybridomas. The supernatants from the hybrid clones are tested by ELISA for specificity to recombinant tumor protein, and epitope mapped using peptides that spanned the entire tumor protein sequence. The mAbs are also tested by flow cytometry for their ability to detect tumor protein on the the surface of cells stably transfected with the cDNA encoding the tumor protein.

[4902] From the foregoing it will be appreciated that, although specific embodiments of the invention have been described herein for purposes of illustration, various modifications may be made without deviating from the spirit and scope of the invention. Accordingly, the invention is not limited except as by the appended claims.

The application's sequence listing, which the Patent Office published only in electronic form, follows.

SEQUENCE LISTING (4560 sequences)

SEQ ID NO: 1 - DNA, 604 bp, Homo sapiens
ctcaggctccctagccccttccccgtcccttccccgcccccgtccccgccccgggggccgccgccacccgcctcccaccatggctctgaagagaatccacaaggaattgaatgatctggcacgggaccctccagcacagtgttcagcaggtcctgttggagatgatatgttccattggcaagctacaataatggggccaaatgacagtccctatcagggtggagtatttttcttgacaattcatttcccaacagattaccccttcaaaccacctaaggttgcatttacaacaagaatttatcatccaaatattaacagtaatggcagcatttgtcttgatattctacgatcacagtggtctccagcactaactatttcaaaagtactcttgtccatctgttctctgttgtgtgatcccaatccagatgatcctttagtgcctgagattgctcggatctacaaaacagatagagaaaagtacaacagaatagctcgggaatggactcagaagtatgcgatgtaattaaagaaattattggataacctctacaaataaagataggggaactctgaaagagaaagtccttttgatttccatttgact

SEQ ID NO: 2 - DNA, 455 bp, Homo sapiens
  misc_feature 6: n = A,T,C or G
caaganatggcaggatgaggatggcaagaagcagctggagaaggacttcagcagcatgaagaagtactgccaagtcatccgtgtcattgcccacacccagatgcgcctgcttcctctgcgccagaagaaggcccacctgatggagatccaggtgaacggaggcactgtggccgagaagctggactgggcccgcgagaggcttgagcagcaggtacctgtgaaccaagtgtttgggcaggatgagatgatcgacgtcatcggggtgaccaagggcaaaggctacaaaggggtcaccagtcgttggcacaccaagaagctgccccgcaagacccaccgaggcctgcgcaaggtggcctgtattggggcatggcatcctgctcgtgtagccttctctgtggcacgcgctgggcagaaaggctaccatcaccgcactgagatcaacaagaagatttata

SEQ ID NO: 3 - DNA, 604 bp, Homo sapiens
gaaggagcagctctgttgcgacataggccgagcagcgaggcccagctccctgaaacaacagtaacctacccctgtgggtcatcatcatgccctccgacctggccaagaagaaggcagccaaaaagaaggaggctgccaaagctcgacagcggcccagaaaaggacatgaagaaaatggagatgttgtcacagaaccacaggtggcagagaagaatgaggccaatggcagagagaccacagaagtagatttgctgaccaaggagctagaggactttgagatgaagaaagctgctgctcgagctgtcactggcgtcctggcctctcaccccaacagtactgatgttcacatcatcaacctctcacttacctttcatggtcaagagctgctcagtgacaccaaactggaattaaactcaggccgtcgttatggcctcattggtttaaatggaattggaaagtccatgctgctctctgctattgggaagcgtgaagtgcccatccctgagcacatcgacatctaccatctgactcgagagatgccccctagtgacaagacacccttgcattgtgtgatggaagtcgacacagagcgggccatgctgga

SEQ ID NO: 4 - DNA, 434 bp, Homo sapiens
gggttcccgagggctggctcatcttcgtggccgagcaggaggagctctacgtccgcgtgcagaacgggttccggaaggtccagctggaggcccggacaccactcccacgagggacggacaatgaagtggccgccttgcagccccccgtggtgcagctgcacgacagcaacccctacccgcggcgggagcacccccaccccaccgcgcggccctggcgggcagatgacatcctggccagcccccctcgcctgcccgagccccagccctaccccggagccccgcaccacagctcctacgtgcacctgcggccggcacgacccacaagcccacccgccacagccaccgcgacttccagccggtgctccacctggttgcgctcaacagccccctgtcaggcggcatgcggggcatccgcggggccgacttccagtgct

SEQ ID NO: 5 - DNA, 301 bp, Homo sapiens
aacagattaccccttcaaaccacctaaggttgcatttacaacaagaatttatcatccaaatattaacagtaatggcagcatttgtcttgatattctacgatcacagtggtctccagcactaactatttcaaaagtactcttgtccatctgttctctgttgtgtgatcccaatccagatgatcctttagtgcctgagattgctcggatctacaaaacagatagagaaaagtacaacagaatagctcgggaatggactcagaagtatgcgatgtaattaaagaaattattggataacctctac

SEQ ID NO: 6 - DNA, 554 bp, Homo sapiens
aagagactcaggccaagaaacgtcttctaaatttccccatcttctaaacccaatccaaatggcgtctggaagtccaatgtggcaaggaaaaacaggtcttcatcgaatctactaattccacaccttttattgacacagaaaatgttgagaatcccaaatttgattgatttgaagaacatgtgagaggtttgactagatgatggatgccaatattaaatctgctggagtttcatgtacaagatgaaggagaggcaacatccaaaatagttaagacatgatttccttgaatgtggcttgagaaatatggacacttaatactaccttgaaaataagaatagaaataaaggatgggattgtggaatggagattcagttttcatttggttcattaattctataaggccataaaacaggtaatataaaaagcttccatgattctatttatatgtacatgagaaggaacttccaggtgttaatgtaaaacttcatctagagtatatcggcggcacgagagtacttctagagcggccgcgggcccatcgattttccacccgg

SEQ ID NO: 7 - DNA, 556 bp, Homo sapiens
gtccaatgggaaatacatcaccaaatctggaacccgtgtggaccaccagacaggccccattgtgtggggggagccagggaccaatggccagcatgctttttaccagctcatccaccaaggcaccaagatgataccctgtgacttcctcatcccggtccagacccagcaccccatacggaagggtctgcatcacaagatcctcctggccaacttcttggcccagacagaggccctgatgaggggaaaatcgacggaggaggcccgaaaggagctccaggctgcgggcaagagtccagaggaccttgagaggctgctgccacataaggtctttgaaggaaatcgcccaaccaactctattgtgttcaccaagctcacaccattcatgcttggagccttggtcgccatgtatgagcacaagatcttcgttcagggcatcatctgggacatcaacagctttgaccagtggggagtggagctgggaaagcagctggctaagaaaatagagcctgagcttgatggcagtgctcaagtgacctctcacgacgcttctaccaat

SEQ ID NO: 8 - DNA, 601 bp, Homo sapiens
ctatcatatagtaaaacccagcccatgacccctaacaggggccctctcagccctcctaatgacctccggcctagccatgtgatttcacttccactccataacgctcctcatactaggcctactaaccaacacactaaccatataccaatgatggcgcgatgtaacacgagaaagcacataccaaggccaccacacaccacctgtccaaaaaggccttcgatacgggataatcctatttattacctcagaagtttttttcttcgcaggatttttctgagccttttaccactccagcctagcccctaccccccaattaggagggcactggcccccaacaggcatcaccccgctaaatcccctagaagtcccactcctaaacacatccgtattactcgcatcaggagtatcaatcacctgagctcaccatagtctaatagaaaacaaccgaaaccaaataattcaagcactgcttattacaattttactgggtctctattttaccctcctacaagcctcagagtacttcgagtctcccttcaccatttccgacggcatctacggctcaacattttttgtagccacaggcttccacggacttcac

SEQ ID NO: 9 - DNA, 602 bp, Homo sapiens
atcagtttatggagagaagagagtctcgatttcggaaggagatgacaaaattgagtaccgagcctggaaccccttccgctccaagctagcagcagcaatcctgggtggtgtggaccagatccacatcaaaccgggggctaaggttctctacctcggggctgcctcgggcaccacggtctcccatgtctctgacatcgttggtccggatggtctagtctatgcagtcgagttctcccaccgctctggccgtgacctcattaacttggccaagaagaggaccaacatcattcctgtgatcgaggatgctcgacacccacacaaataccgcatgctcatcgcaatggtggatgtgatctttgctgatgtggcccagccagaccagacccggattgtggccctgaatgcccacaccttcctgcgtaatggaggacactttgtgatttccattaaggccaactgcattgactccacagcctcagccgaggccgtgtttgcctccgaagtgaaaaagatgcaacaggagaacatgaagccgcaggagcagttgacccttgagccatatgaaagagaccatgccgtggtcgtgggagtgtacaggccac

SEQ ID NO: 10 - DNA, 372 bp, Homo sapiens
gtttgtcggggacatttaactcatggaggtgctttagatttcaacatcagatggttgaagctggaagtttaattatatgtagagtgagaaggcagttccagttttagcacagatttgtttatgtgttcagattttaatagagattcaaaaatgactcatttttaccaataatgttaaattagttttggttgtgctagcatgaattaataaccaccattttataccagtatcatcagtgaagaattgtatttcaagattcaaacaataaccagcaattaaacttttttctacaatgtatttgtttgcgagtaggacttgggagtcattgggaaaaaaaaataataaattttccccttcattaacgaaaaaaaa

SEQ ID NO: 11 - DNA, 493 bp, Homo sapiens
gtctcaggtcgccgctgcggagggagccgccgccatgtctgcgcatctgcaatggatggtcgtgcggaactgctccagtttcctgatcaagaggaataagcagacctacagcactgagcccaataacttgaaggcccgcaattccttccgctacaacggactgattcaccgcaagactgtgggcgtggagccggcagccgacggcaaaggtgtcgtggtggtcattaagcggagatccggccagcggaagcctgccacctcctatgtgcggaccaccatcaacaagaatgctcgcgccacgctcagcagcatcagacacatgatccgcaagaacaagtaccgccccgacctgcgcatggcagccatccgcagggccagcgccatcctgcgcagccagaagcctgtgatggtgaagaggaagcggacccgccccaccaagagctcctgagccccctgcccccagagcaataaagtcagctggctttctcaaaaa

SEQ ID NO: 12 - DNA, 442 bp, Homo sapiens
gtcattgatagaaggactcacgggcttggattgattaagactaaacatggagttggcaaactttcttcaagtattgagttctgttcaatgcattggacatgtgatttaagggaaaagtgtgaatgcttatagatgatgaaaacctggtgggctgcagagcccagtttagaagaagtgagttgggggttggggacagatttggtggtggtatttcccaactgtttcctcccctaaattcagaggaatgcagctatgccagaagccagagaagagccactcgtagcttctgctttggggacaactggtcagttgaaagtcccaggagttcctttgtggctttctgtatacttttgcctggttaaagtctgtggctaaaaaatagtcgaacctttcttgagaactctgtaacaaagtatgtttttgattaaaagagaaagccaaa

SEQ ID NO: 13 - DNA, 603 bp, Homo sapiens
ctttcatccctatgtggaaaacgtaggtggcaagtgggagaaaccatcagaaattttggaaatcaaaggacagaactgggaagaacaagtgaatagtctgcctgaagttttcagaaaagctggttttgttatcgaagctttcaccagactaccatacctgtgtgaaggcgacatgtataatgactactacgttctggatgacgctgtctttgttctcaaaccagtataaacacgtggaggtcgaagtcttcagagtccgcaccctccgggatgtgcccttggaagagggtctgtgttcacaattacgtgaagggaggacccttggggaccgccattctaaatatcatgtaggaatttaaaaagccaaaatactaattatttctttgtagtgtgtaaaggaatgtttttaaaagacaaaaacccaactctttgtggatttttatcaactctttactcagagccactctccaatgcaggtcacactccaattatgatggaagatattttttatacttaattgcagtagggactcattcccagacaaagcaatagtcacgacttcatggaaccaatcaatggattgttttttgaagactggcaata

SEQ ID NO: 14 - DNA, 531 bp, Homo sapiens
caaatatccaagaagaggaagtttgtcgctgatggcatcttcaaagctgaactgaatgagtttcttactcgggagctggctgaagatggctactctggagttgaggtgcgagttacaccaaccaggacagaaatcattatcttagccaccagaacacagaatgttcttggtgagaagggccggcggattcgggaactgactgctgtagttcagaagaggtttggctttccagagggcagtgtagagctttatgctgaaaaggtggccactagaggtctgtgtgccattgcccaggcagagtctctgcgttacaaactcctaggagggcttgctgtgcggagggcctgctatggtgtgctgcggttcatcatggagagtggggccaaaggctgcgaggttgtggtgtctgggaaactccgaggacagagggctaaatccatgaagtttgtggatggcctgatgatccacagcggagaccctgttaactactacgttgacactgctgtgccccacgtgttgctcagacagggt

SEQ ID NO: 15 - DNA, 451 bp, Homo sapiens
  misc_feature 4, 39, 40, 43, 168, 212, 385, 447: n = A,T,C or G
tttnattgtggagatctccctgacatgcaagaacagggnncanaacatggctctctatgctgacgtcggtggaaaacaattccctgtcactcgaggccaggatgtggggcgttatcaggtgtcctggagcctggaccacaagagcgcccacgcaggcacctatgaggntagattcttcgacgaggagtcctacagcctcctcaggaaggctnagaggaataacgaggacatttccatcatcccgcctctgtttacagtcagcgtggaccatcggggcacttggaacgggccctgggtgtccactgaggtgctggctgcggcgatcggcttgtgatctactacttggccttcagtgcgaagagccacatccaggcctgagggcggnaccccagccctgccttgctttcttcaataaacatcacaggacctgggactgcacaggaaacnaaaa

SEQ ID NO: 16 - DNA, 502 bp, Homo sapiens
  misc_feature 477: n = A,T,C or G
ggacagttgggctgcaggatgcaactcaacctcttttggatcctagagacccctgccaagcccccatcagtcctatttttaaatgaagacatcgccatttctagaagacctgagattttcttccctctgtgcttcgatgtattttaacctcaacattttgaaacggaaaatgcaaggaggggccaagaaatgtcctggggatttgatgccaggaagtacctggtaaggattggagattgctccagaatctactgcatgtcccaatttgcagtttgctcactagggctatatacaaaagctatacccttgagggtttttttttttttcttttgatttcctcaggaccttagagggaaaacaaacagtagcagctaatattctcaagtatattgctgcttagaaagatcctcaggaacaattagcagcaataagcaagcctttgaaaagatctgaattctttttcctgaaatatttacnatacacaggtgctttttatctgaaa

SEQ ID NO: 17 - DNA, 492 bp, Homo sapiens
ggcagtatggcaccatcagccacgggatcgtggaggttgatccaatgctcaccccagaagagcgtcacctgaacaagatgcagaaccatggctatgagaaccccacctacaaatacctggagcagatgcagatttaggtggcagggagcgcggcagccctggcggagggatgcaggtgggccggaagatcccacgattccgatcgactgccaagcagcagccgctgccaggggctgcgtctgacatcctgacctcctggactgtaggactatataaagtactactgtagaactgcaatttccattcttttaaatgggtgaaaaatggtaatataacaatatatgatatataaaccttaaatgaaaaaaatgatctattgcagatatttgatgtagttttcttttttaaattaatcagaaaccccacttccattgtattgtctgacacatgctctcaatatataataaatgggaaatgtcgattttcaaaaaa

SEQ ID NO: 18 - DNA, 555 bp, Homo sapiens
  misc_feature 497: n = A,T,C or G
gttgtggctctgagctgctctacagagcttcagtgtgagaggatcgagccattgaaagctcattaccagtaggacataatttttggctctccctattcacaaccagtgcacagtttgacacagtggcctcaggttcacagtgcaccatgtcactgtgctatcctacgaaatcatttgtttctaagttgtgtttattcctggagtgacatgccaccccgaatggctcactttcactgaggatgctgtcctctgatttagctgctgcctccagcctctggcttgagaacttactaaaggcacttccttcctgttaaacccctgttaactctccataaatttggtgattctctgctaggcctaagattttgagttaacatctcttgaagccaaactccaccttctgtgctttttgcttgggataatggagtttttctttagaaacagtgccaagaatgacaagatattaaaaaaaaaaaagaaagaaaaaaaaaaaaacncctacttttaaagaaaatacctaacagatttttaatatagttatctctaccactttct

SEQ ID NO: 19 - DNA, 466 bp, Homo sapiens
  misc_feature 373, 377, 461: n = A,T,C or G
atcagtttatggagagaagagagtctcgatttcggaaggagatgacaaaattgagtaccgagcctggaaccccttccgctccaagctagcagcagcaatcctgggtggtgtggaccagatccacatcaaaccgggggctaaggttctctacctcggggctgcctcgggcaccacggtctcccatgtctctgacatcgttggtccggatggtctagtctatgcagtcgagttctcccaccgctctggccgtgacctcattaacttggccaagaagaggaccaacatcattcctgtgatcgaggatgctcgacacccacacaaataccgcatgctcatcgcaatggtggatgtgatctttgctgatgtggcccanccanaccaaacccggattgtggccctgaatgcccacaccttcctgcgtaatggaggacactttgtgatttccattaaggccaactgcnttgac

SEQ ID NO: 20 - DNA, 585 bp, Homo sapiens
cgctttccgagcccgcttgcacctcggcgatccccgactcccttctttatggcgtcgctcctgtgctgtgggccgaagctggccgcctgcggcatcgtcctcagcgcctggggagtgatcatgttgataatgctcggaatatttttcaatgtccattccgctgtgttgattgaggacgttcccttcacggagaaagattttgagaatggcccccagaacatatacaacctttacgagcaagtcagctacaactgtttcatcgctgcaggcctttacctcctcctcggaggcttctctttctgccaagttcggctcaataagcgcaaggaatacatggtgcgctagggccccggcgcgtttccccgctccagcccctcctctatttaaagactccctgcaccgtgtcacccaggtcgcgtcccacccttgccggcgccctctgtgggactgggtttcccgggcgagagactgaatcccttctcccatctctggcatccggcccccgtggagagggctgaggctggggggctgttccgtctctccacccttcgcttgtgtcccgtatctcaataaagagaatctgct

SEQ ID NO: 21 - DNA, 618 bp, Homo sapiens
ggccgacgccatcaacaccgagttcaagaacacccgcaccaacgagaaggtggagctgcaggagctgaatgaccgcttcgccaactacatcgacaaggtgcgcttcctggagcagcagaataagatcctgctggccgagctcgagcagctcaagggccaaggcaagtcgcgcctgggggacctctacgaggaggagatgcgggagctgcgccggcaggtggaccagctaaccaacgacaaagcccgcgtcgaggtggagcgcgacaacctggccgaggacatcatgcgcctccgggagaaattgcaggaggagatgcttcagagagaggaagccgaaaacaccctgcaatctttcagacaggatgttgacaatgcgtctctggcacgtcttgaccttgaacgcaaagtggaatctttgcaagaagagattgcctttttgaagaaactccacgaagaggaaatccaggagctgcaggctcagattcaggaacagcatgtccaaatcgatgtggatgtttccaagcctgacctcacggctgccctgcgtgacgtacgtcagcaatatgaaagtgtggctgccaagaacctgcaggaggcagaagaatggtacaaatccaa

SEQ ID NO: 22 - DNA, 566 bp, Homo sapiens
  misc_feature 508, 553: n = A,T,C or G
cacgttgttccgtatggacttggaagccctaggtccaagagagccttggagaatttacttcccacaaaggcaacagaccgtgagaatagatgccaatgtgctagccaaaaagacaagaagtgctggaatttttgccaagcaggaaaagaactcagggctgaagacattatggagaaagactggaataatcataagaaaggaaaagactgttccaagcttgggaaaaagtgtatttatcagcagttagtgagaggaagaaaaatcagaagaagttcagaggaacacctaagacaaaccaggtcggagaccatgagaaacagcgtcaaatcatcttttcatgatcccaagctgaaaggcaatccctccagagagcgttatgtgacccacaaccgagcacattggtgacagaccttcggggcctgtctgaagccatagcctccacggagagccctgtggccgactctgcactctccaccctggctgggatcagagcaggagcatcctctgntggttcctgactggcaaaggaccagcgtcctcgttcaaaacattncaagaaaggttaa

SEQ ID NO: 23 - DNA, 616 bp, Homo sapiens
ctcagctctcggcgcacggcccagcttccttcaaaatgtctactgttcacgaaatcctgtgcaagctcagcttggagggtgatcactctacacccccaagtgcatatgggtctgtcaaagcctatactaactttgatgctgagcgggatgctttgaacattgaaacagccatcaagaccaaaggtgtggatgaggtcaccattgtcaacattttgaccaaccgcagcaatgcacagagacaggatattgccttcgcctaccagagaaggaccaaaaaggaacttgcatcagcactgaagtcagccttatctggccacctggagacgttgattttgggcctattgaagacacctgctcagtatgacgcttctgagctaaaagcttccatgaaggggctgggaaccgacgaggactctctcattgagatcatctgctccagaaccaaccaggagctgcaggaaattaacagagtctacaaggaaatgtacaagactgatctggagaaggacattatttcggacacatctggtgacttccgcaagctgatggttgccctggcaaagggtagaagagcagaggatggctctgtcattgattatgaactgattgaccaaga

SEQ ID NO: 24 - DNA, 416 bp, Homo sapiens
  misc_feature 92, 109, 129, 142, 153, 172, 178, 182, 244, 250, 269, 292,298, 304, 375, 400, 410: n = A,T,C or G
cagcgggcgacgaccgaacgcccccgggaacaccgggccccgagctcggtcccgcgcccgaggatcctccacggggctagatggctgcgtcnggggcgggagcggaggngagcgggcgctagggccgcnagcccccgccggnccttcctccancgccctgcggaccccgcanaaggcnctcncctccctagcccgcaaaaacatatcgatttttctcgctgtggcaacggggacgtcctgatanatcctntgctccaatatagcaactncggccttccctgccctgacctgnaacctntggganggctgcagagtaagtgccgcctctgcactccgacggaggcacgaggcctgtggagtaggtccctctgttancgacaggtgctgacacttggcgctncatgcttgcnggtgcc

SEQ ID NO: 25 - DNA, 616 bp, Homo sapiens
  misc_feature 594: n = A,T,C or G
aagagactgctgttcgagaaattaaatcttaaaatctgtgtaaatagaaaacttgaaccattagtaataacagaactgccaatcagggcctagtttctattaataaattggataaatttaataaaataagagtgatactgaaagtgctcagatgactaatattatgctatagttaaatggcttaaaatatttaacctgttaacttttttccacaaactcattataatatttttcataggcaagtttcctctcagtagtgataacaacatttttagacattcaaaactgtcttcaagaagtcacgtttttcatttataacaattttcttataaaaacatgttgcttttaaaatgtggagtagctgtaatcactttattttatgatagtatcttaatgaaaaatactacttctttagcttgggctacatgtgtcagggtttttctccaggtgcttatattgatctggaattgtaatgtaaaaagcaatgcaaacttaggcgagtacttcttgaaatgtctatttaagctgctttaagttaatagaaaagattaaagcaaaatattcatttttactttttcttatttttaaaattangctgaatgtacttcatggggat

SEQ ID NO: 26 - DNA, 617 bp, Homo sapiens
tctggcctgtcagcaccagttttgccgcagctgctgggagcagcactgctcagttctcgtcaaggacggcgtgggcgtgggagtctcttgcatggctcaggactgtccactccgtacaccagaggactttgtgtttccattgcttcccaatgaagaattgagagagaaatacaggcgctacctcttcagggactatgtggagagtcattaccagctccagctgtgccctggtgcagactgccccatggttattcgggtacaggagcctagagctcgccgagtacagtgcaatcggtgcaacgaggtcttctgtttcaagtgtcgtcagatgtatcacgcacccacagactgtgccacaatccggaaatggctcacgaagtgtgcagacgactctgaaacagccaactacattagtgctcacactaaagactgtcccaagtgcaacatctgcattgagaagaatggaggctgcaatcacatgcaatgctccaaatgtaaacacgacttctgctggatgtgtctaggagattggaagactcatggcagtgaatactatgagtgcagtcgttacaaggagaatcctgacatcgtgaaccagagccacaagcccagcgagg

SEQ ID NO: 27 - DNA, 566 bp, Homo sapiens
cttttatttttctcaggaaggattgtggaagacttcatagagtgagtggcattggagattaccttgaagtgaaggaggacaaagaaggaaaagagatgaggcataaagtgatgaaaccaggcacaagaaagtgtgcggtgtgttctgggacaaggaatgttctgctactgtcgaataatggggactaaagctggcttgttctggggaaagctcatataagtatggattttattcctcaactagtaggataccaatactggtattgaaacttggggaaaataactggagataccagtgcagctatttaaagctgtagcaagggctgcaatcttgcggagattttaaagagaagttttaaagtttctaatactgatgcctctttttggtaaatacaagttttataaatcctgccctgggatcctgattccccattaatcaagatttgtcagacttcaccttctataattagaaaacacagttataagaacagtcaattttttaaattttccaaattaaaaaattgcaccatgattttgaacaagcacttccaattacattacccatct

SEQ ID NO: 28 - DNA, 617 bp, Homo sapiens
agaagaaggaggttcctgctgtgccagaaacccttaagaaaaagcgaaggaatttcgcagagctgaagatcaagcgcctgagaaagaagtttgcccaaaagatgcttcgaaaggcaaggaggaagcttatctatgaaaaagcaaagcactatcacaaggaatataggcagatgtacagaactgaaattcgaatggcgaggatggcaagaaaagctggcaacttctatgtacctgcagaacccaaattggcgtttgtcatcagaatcagaggtatcaatggagtgagcccaaaggttcgaaaggtgttgcagcttcttcgccttcgtcaaatcttcaatggaacctttgtgaagctcaacaaggcttcgattaacatgctgaggattgtagagccatatattgcatgggggtccccaatctgaagtcagtaaatgaactaatctacaagcgtggttatggcaaaatcaataagaagcgaattgctttgacagataacgctttgattgctcgatctcttggtaaatacggcatcatctgcatggaggatttgattcatgagatctatactgttggaaaacgcttcaaagaggcaaataacttcctgtggcccttcaaat

SEQ ID NO: 29 - DNA, 616 bp, Homo sapiens
gccagtgtaaccctgtacatgtaagaaaagcaataacatagcactttgttggtttatatatataatgtgacttcaatgcaaattttatttttatatttacaattgatatgcatttaccagtataaactagacatgtctggagagcctaataatgttcagcacactttggttagttcaccaacagtcttaccaagcctgggcccagccaccctagagaagttattcagccctggctgcagtgacatcacctgaggagcttttaaaagcttgaagcccagctacacctcagaccgattaaacgcaaatctctggggctgaaacccaagcattcgtagtttttaaagctcctgaggtcattccaatgtgcggccaaagttgagaactactggcctagggattagccacaaggacatggacttggaggcaaattctgcaggtgtatgtgattctcaggcctagagagctaagacacaaagacctccacatctgtcgctgagagtcaagaacctgaacagagtttccatgaaggttctccaagcactagaagggagagtgtctaaacaatggttgaaaagcaaaggaaatataaaacagacacctctttccatttcctaag

SEQ ID NO: 30 - DNA, 614 bp, Homo sapiens
cctgcaggaggcagaagaatggtacaaatccaagtttgctgacctctctgaggctgccaaccggaacaatgacgccctgcgccaggcaaagcaggagtccactgagtaccggagacaggtgcagtccctcacctgtgaagtggatgcccttaaaggaaccaatgagtccctggaacgccagatgcgtgaaatggaagagaactttgccgttgaagctgctaactaccaagacactattggccgcctgcaggatgagattcagaatatgaaggaggaaatggctcgtcaccttcgtgaataccaagacctgctcaatgttaagatggcccttgacattgagattgccacctacaggaagctgctggaaggcgaggagagcaggatttctctgcctcttccaaacttttcctccctgaacctgagggaaactaatctggattcactccctctggttgatacccactcaaaaaggacacttctgattaagacggttgaaactagagatggacaggttatcaacgaaacttctcagcatcacgatgaccttgaataaaaattgcacacactcagtgcagcaatatattaccagcaaaaaaaaaaaaaaaaaactcgag

SEQ ID NO: 31 - DNA, 567 bp, Homo sapiens
atcagtttatggagagaagagagtctcgatttcggaaggagatgacaaaattgagtaccgagcctggaaccccttccgctccaagctagcagcagcaatcctgggtggtgtggaccagatccacatcaaaccgggggctaaggttctctacctcggggctgcctcgggcaccacggtctcccatgtctctgacatcgttggtccggatggtctagtctatgcagtcgagttctcccaccgctctggccgtgacctcattaacttggccaagaagaggaccaacatcattcctgtgatcgaggatgctcgacacccacacaaataccgcatgctcatcgcaatggtggatgtgatctttgctgatgtggcccagccagaccagacccggattgtggccctgaatgcccacaccttcctgcgtaatggaggacactttgtgatttccattaaggccaactgcattgactccacagcctcagccgaggccgtgtttgcctccgaagtgaaaaagatgcaacaggagaacatgaagccgcaggagcagttgacccttgagccatatgaaag

SEQ ID NO: 32 - DNA, 498 bp, Homo sapiens
atcttgacgaggctgcggtgtctgctgctattctccgagcttcgcaatgccgcctaaggacgacaagaagaagaaggacgctggaaagtcggccaagaaagacaaagacccagtgaacaaatccgggggcaaggccaaaaagaagaagtggtccaaaggcaaagttcgggacaagctcaataacttagtcttgtttgacaaagctacctatgataaactctgtaaggaagttcccaactataaacttataaccccagctgtggtctctgagagactgaagattcgaggctccctggccagggcagcccttcaggagctccttagtaaaggacttatcaaactggtttcaaagcacagagctcaagtaatttacaccagaaataccaagggtggagatgctccagctgctggtgaagatgcatgaataggtccaaccagctgtacatttggaaaaataaaactttattaaatcaaaaaaaaaaaaaaaaaaaactcgag

SEQ ID NO: 33 - DNA, 517 bp, Homo sapiens
gcgcgaggggcggccgggaggcggcggcggttggccgccagaagtagcagcaggaccggcggcggcgacggcagccctgaaatgcattttcctctccagcggccatgttaaccaggaaaccttcggccgccgctcccgccgcctacccgaccgattggcggcagtaagcacacaatgaatgatcacctgcatgtcggcagccacgctcacggacagatccaggttcaacagttgtttgaggataacagtaacaagcggacagtgctcacgacacaaccaaatgggcttacaacagtgggcaaaacgggcttgccagtggtgccagagcggcagctggacagcattcatagacggcaggggagctccacctctctaaagtccatggaaggcatggggaaggtgaaagccacccccatgacacctgaacaagcaatgaagcaatacatgcaaaaactcacagccttcgaacaccatgagattttcagctaccctgaaatatatttcttgggtctaaatg

SEQ ID NO: 34 - DNA, 467 bp, Homo sapiens
gagtcagccagcatgaccgagcgccgcgtccccttctcgctcctgcggggccccagctgggaccccttccgcgactggtacccgcatagccgcctcttcgaccaggccttcgggctgccccggctgccggaggagtggtcgcagtggttaggcggcagcagctggccaggctacgtgcgccccctgccccccgccgccatcgagagccccgcagtggccgcgcccgcctacagccgcgcgctcagccggcaactcagcagcggggtctcggagatccggcacactgcggaccgctggcgcgtgtccctggatgtcaaccacttcgccccggacgagctgacggtcaagaccaaggatggcgtggtggagatcaccggcaaagcacgaggagcggcaggacgagcatggctacatctcccggtgcttcacgcggaaatacacgctggcccccgggtgtggaccccacc

SEQ ID NO: 35 - DNA, 2117 bp, Homo sapiens
gaaattgccctcaatgtctactctgcatttctttcttgtgataagcacacacttttattgcaacataatgatctgctcacatttccttgcctgggggctgtaaaaccttacagaacagaaatccttgcctctttcaccagccacacctgccataccaggggtacagctttgtactattgaagacacagacaggatttttaaatgtaaatctatttttgtaactttgttgcgggatatagttctctttatgtagcactgaactttgtacaatatatttttagaaactcatttttctactaaaacaaacacagtttactttagagagactgcaatagaatcaaaatttgaaactgaaatctttgtttaaaagggttaagttgaggcaagaggaaagccctttctctctcttataaaaaggcacaacctcattggggagctaagctaggtcattgtcatggtgaagaagagaagcatcgtttttatatttaggaaattttaaaagatgatggaaagcacatttagcttggtctgaggcaggttctgttggggcagtgttaatggaaagggctcactgttgttactacctagaaaaatccagttgcatgccatactctcatcatctgccagtgtaaccctgtacatgtaagaaaagcaataacatagcactttgttggtttatatatataatgtgacttcaatgcaaattttatttttatatttacaattgatatgcatttaccaatataaactagacatgtctggagagcctaataatgttcagcacactttggttagttcaccaacagtcttaccaagcctgggcccagccaccctagagaagttattcagccctggctgcagtgacatcacctgaggagcttttaaaagcttgaagcccagctacacctcagaccgattaaacgcaaatctctggggctgaaacccaagcattcgtagtttttaaagctcctgaggtcattccaatgtgcggccaaagttgagaactactggcctagggattagccacaaggacatggacttggaggcaaattctgcaggtgtatgtgattctcaggcctagagagctaagacacaaagacctccacatctgtcgctgagagtcaagaacctgaacagagtttccatgaaggttctccaagcactagaagggagagtgtctaaacaatggttgaaaagcaaaggaaatataaaacagacacctctttccatttcctaaggtttttctctttattaagggtggactagtaataaaatataatattcttgctgcttatgcagctgacattgttgccctccctaaagcaaccaagtagcctttatttcccacagtgaaagaaaacgctggcctatcagttacattacaaaaggcagatttcaagaggattgagtaagtagttggatggctttcataaaaacaagaattcaagaagaggattcatgctttaagaaacatttgttatacattcctcacaaattatacctgggataaaaactatgtagcaggcagtgtgttttccttccatgtctctctgcactacctgcagtgtgtcctctgaggctgcaagtctgtcctatctgaattcccagcagaagcactaagaagctccaacctatcacctagcagataaacctatggggaaaacttaaatctgtgcatacatttctggatgcatttacttatctttaaaaaaaaaggaatcctatgacctgatttggccacaaaaataatcttgctgtacaatacaatctcttggaaattaagagatcctatggatttgatgactggtattagaggtgacaatgtaaccgattaacaacagacagcaataacttcgttttagaaacattcaagcaatagctttatagcttcaacatatggtacgttttaaccttgaaagttttgcaatgatgaaagcagtatttgtacaaatgaaaagcagaattctcttttatatggtttatactgttgatcagaaatgttgattgtgcattgagtattaaaaaattagatgtatattattcattgttctttactcatgagtaccttataataataataatgtattctttgttaacaaaaaaaaaaaaaaaaaaaa

SEQ ID NO: 36 - DNA, 2660 bp, Homo sapiens
gccctgccagccccagacaagggcacagaaacagccaggccacaccaactacagcagctattccaagcggaagcgcctcactcggggccgggccaagaacaccacctcttcaccctgtaaggggcgtgccaagcgacgacgacagcagcaggtgctgcccctggatcccgcagagcctgaaatccgcctcaagtacatttcctcttgcaagcggctgaggtcagacagccggacccccgccttctcacccttcgtgcgggtggagaagcgagacgcgttcaccaccatatgcactgttgtcaactcccctggagatgcgcccaagccccacaggaagccttcctcctctgcctcctcttcctcatcctcgtcctcgttctccttggatgcagccggggcctccctggccacactccctggaggctccatcctgcagccgcggccctccttgcccctctcctccacgatgcacttggggcctgtggtttccaaggccctgagtacctcttgccttgtttgctgcctctgccaaaacccggccaacttcaaggaccttggggacctctgtgggccctactaccctgaacactgcctccccaaaaagaagccaaaaactcaaggagaaggtgcggccagaaggcacctgtgaggaggcctcgctgccgcttgagagaacactcaaaggtcccgagtgtgcagctgccgccactgccgggaagccccccaggcctgacggcccagctgacccggccaagcagggcccactgcgcaccagtgcccggggcctgtcccggaggctgcagagctgctactgctgtgatggccgggaggatgggggcgaggaggcagccccagccgacaagggtcgcaaacatgagtgcagcaaggaggctccggcagagcccggcggggaggcccaggagcactgggtgcatgaggcctgtgccgtgtggaccggcggcgtctacctggtggccgggaagctctttgggctgcaggaggccatgaaggtggccgtggacatgatgtgttccagctgccaagaagccggggccaccatcgggtgctgccacaaaggatgcctccacacctaccactacccgtgtgccagcgatgcaggttgcatattcatcgaagagaacttttctttgaaatgtcccaaacataagaggctgccgtagtaatccaccccaacggccggaggagccgccggagcccgcctgcccgcccgccgccgaaggagaggagccgcctgcgcagcccccgggcctttgagctgctcccagcgctggtccagagccgatccttgatccgggtcccggatcgtggatccggccgcctagggctcagacttgcggccccgggttgggaggaaaacccgttccggagccgcctgctcccggaaccggacggcacagggcgttcttgcccaccccaggggccaggcttgcggagggggagcccgcggagcggccagactccccggggcgctcagcctccggcgagggtgggagacggctttgtcctggggacactttccctctggaatctcaagacgacgtggcacacattccacgtgggtgctgccgccaccccagtcggtcgtggcgtgcagctgggagccctgggcttgggggtgggggtcgaaacagtactggaagaggcggagggcggctcctagctccgtggactaggcgggggagaaaggaagcctttctgagagcgggctaggccggcactggagaggccggagcctttggaacaaaccgtgcggaacgcgtccaggggccttcccgcccagcctttgccagatctctcgtgcggttcgggcaaagccggggtagacctgggctatgctcagttaggggttgcgggatccccgagtgtgggcgggactgggacaccctttggcctctgtttgtcccctttccagtcctccaccccacccctggagcccagcctgggagcgcaaaacccaagaagcggccagaacgcacctccggctccggcggacgcgcgaccgttgtgcaccaccagggaccgccgcgcctactctgcacgggagcagggacagcgctagatttcgtgtacaaaacctgtgtacccctctatatatatgttacatagaatgtatatatgttgggaacatgctcgcttctcccgtgtgtcgccgccgtgcgtcgtgcgcccgcaacagagccccaaccgggcctttgccgggtaaggggctaccgcgacgccacttgtccacgcagccaccaccggcccgggccagtccctgccagtccgtccgcctgtccgtccgtgtcctcagctctgtccacgcttcgataggcctgacgcagcccccagcccagggccgccctagcaacttcctgtacatatgactgtaaaatggtaaacgtgtgtattatatctggcctcgttatatagtgtatatatatgtatacatatacatatatataatatatatgaagactgtaaatgttaagacgactagtgttcttattagtatattgcttcacactgaagattgtgtgtatcgagctgtttctaaaagatgtttattttccttaagagtaaaaaacagtcattgcattcagaaaaaaaaaaaaaaaaaaagtcaataaagatacaacgattgttttggaaaaaaaaaa

SEQ ID NO: 37 - DNA, 603 bp, Homo sapiens
agggtgtggaggtgggagaggccggccaaggcaaggacttcatcagcctcgggcttcaagacgggcaccttgtcttcaggtaccagctgggtagtggggaggcccgcctggtctctgaggaccccatcaatgacggcgagtggcaccgggtgacagcactgcgggagggccgcagaggttccatccaagtcgacggtgaggagctggtcagcggccggtccccaggtcccaacgtggcagtcaacgccaagggcagcgtctacatcggcggagcccctgacgtggccacgctgaccgggggcagattctcctcgggcatcacaggctgtgtcaagaacctggtgctgcactcggcccgacccggcgccccgcccccacagcccctggacctgcagcaccgcgcccaggccggggccaacacacgcccctgcccctcgtaggcacctgcctgccccacacggactcccgggccacgccccagcccgacaatgtcgagtatattattattaatattattatgaatttttgtaagaaaccgaggcgatgccacgctttgctgctaccgccctgggctggactggaggtgggcatgccaccctcaca

SEQ ID NO: 38 - DNA, 601 bp, Homo sapiens
cggtagccctggagaggccgaggctctaggccgcgaggggcgggtgcaatggcggaggaacaggtgaaccgcagcgccggcctggcccccgactgtgaggcctcggcgactgcagaaactacggtttcctcagtggggacctgtgaagccgctgccaagtcaccagagcccaaggactacgacagcacctgcgtgttctgccggatcgcggggcggcaggacccgggcaccgaactcctgcactgcgagaatgaggacctaatttgcttcaaagatatcaaaccagcagcaactcatcattatcttgtggtgccaaagaagcatattggaaactgcagaactctaaggaaagatcaagtagaactggttgagaacatggtaactgttggaaaaaccattcttgaaagaaataatttcactgacttcacgaatgtgaggatgggttttcatatgccaccattctgttccatttcccacttgcaccttcatgttctggcaccagtggatcagcttggcttcttatccaagttggtttatagagtcaattcctattggtttatcacagctgatcacttgattgaaaaactaagaacatgaaaat

SEQ ID NO: 39 - DNA, 694 bp, Homo sapiens
gtttctaaaggatgtgtaagaaaccagaggtaaaggtctcgcgatatcttaagacatccggcgtagtacgcttcagtgagccacagcgctagagaagtaggagaagctcgcgagatctgtgccgttgccgaggagactaggagggggaggagaggggatctcgcgaaaggaaagaggtcgggagcgctcgcgagatctcggaccacccaacctgaaaggtgcttaggaagttgaaaggcccagaggaggcctccgggcaaatggccggagctggaccgaccatgctgctacgagaagagaatggctgttgcagtcggcgtcagagcagctccagtgctggggattcggacggagagcgcgaggactcggcggctgagcgcgcccgacagcagctagaggcgctgctcaacaagactatgcgcattcgcatgacagatggacggacactggtcggctgcttcctctgcactgaccgtgactgcaatgtcatcctgggctcggcgcaggagttcctcaagccgtcggattccttctctgccggggagccccgtgtgctgggcctggccatggtacccggacaccacatcgtttccattgaggtgcagagggagagtctgaccgggcctccgtatctctgaccacgatggcgcttacctttcagacttcattaaacttatgaccgaaaaaaaaaaaa

SEQ ID NO: 40 - DNA, 652 bp, Homo sapiens
gccagtgtaaccctgtacatgtaagaaaagcaataacatagcactttgttggtttatatatataatgtgacttcaatgcaaattttatttttatatttacaattgatatgcatttaccagtataaactagacatgtctggagagcctaataatgttcagcacactttggttagttcaccaacagtcttaccaagcctgggcccagccaccctagagaagttattcagccctggctgcagtgacatcacctgaggagcttttaaaagcttgaagcccagctacacctcagaccgattaaacgcaaatctctggggctgaaacccaagcattcgtagtttttaaagctcctgaggtcattccaatgtgcggccaaagttgagaactactggcctagggattagccacaaggacatggacttggaggcaaattctgcaggtgtatgtgattctcaggcctagagagctaagacacaaagacctccacatctgtcgctgagagtcaagaacctgaacagagtttccatgaaggttctccaagcactagaagggagagtgtctaaacaatggttgaaaagcaaaggaaatataaaacagacacctctttccatttcctaaggtttctctctttattaagggtggactagtaataaaa

SEQ ID NO: 41 - DNA, 601 bp, Homo sapiens
  misc_feature 592: n = A,T,C or G
gccagcgagagggcgcgagcggcggcgctgcctgcagcctgcagcctgcagcctccggccggccggcgagccagtgcgcgtgcgcggcggcggcctccgcagcgaccggggagcggactgaccggcgggagggctagcgagccagcggtgtgaggcgcgaggcgaggccgagccgcgagcgacatgggggaccgggagcagctgctgcagcgggcgcggctggccgagcaggcggagcgctacgacgacatggcctccgctatgaaggcggtgacagagctgaatgaacctctctccaatgaagatcgaaatctcctctctgtggcctacaagaatgtggttggtgccaggcgatcttcctggagggtcattagcagcattgagcagaaaaccatggctgatggaaacgaaaagaaattggagaaagttaaagcttaccgggagaagattgagaaggagctggagacagtttgcaatgatgtcctgtctctgcttgacaagttcctgatcaagaactgcaatgatttccagtatgagagcaaggtgttttacctgaaaatgaagggtgattactacccgctacttagcagangtcgcttct

SEQ ID NO: 42 - DNA, 602 bp, Homo sapiens
gaaagcctcgtaccctggcctgcagtttgaaatcattgctatgtccaccacaggggacaagattcttgatactgcactctctaagattggagagaaaagcctgtttaccaaggagcttgaacatgccctggagaagaatgaagtggacctggttgttcactccttgaaggacctgcccactgtgcttcctcctggcttcaccatcggagccatctgcaagcgggaaaaccctcatgatgctgttgtctttcacccaaaatttgttgggaagaccctagaaaccctgccagagaagagtgtggtgggaaccagctccctgcgaagagcagcccagctgcagagaaagttcccgcatctggagttcaggagtattcggggaaacctcaacacccggcttcggaagctggacgagcagcaggagttcagtgccatcatcctggcaacagctggcctgcagcgcatgggctggcacaaccgggtggggcagatcctgcaccctgaggaatgcatgtatgctgtgggccagggggccttgggcgtggaagtgcgagccaaggaccaggacatcttggatctggtgggtgtgctgcacgatcccgaga

SEQ ID NO: 43 - DNA, 599 bp, Homo sapiens
ggagtcagccagcatgaccgagcgccgcgtgcccttctcgctcctgcggggccccagctgggaccccttccgcgactggtacccgcatagccgcctcttcgaccaggccttcgggctgccccggctgccggaggagtggtcgcagtggttaggcggcagcagctggccaggctacgtgcgccccctgccccccgccgccatcgagagccccgcagtggccgcgcccgcctacagccgcgcgctcagccggcaactcagcagcggggtctcggagatccggcacactgcggaccgctggcgcgtgtccctggatgtcaaccacttcgccccggacgagctgacggtcaagaccaaggatggcgtggtggagatcaccggcaagcacgaggagcggcaggacgagcatggctacatctcccggtgcttcacgcggaaatacacgctgccccccggtgtggaccccacccaagtttcctcctccctgtcccctgagggcacactgaccgtggaggcccccatgcccaagctagccacgcagtccaacgagatcaccatcccagtcaccttcgagtcgcgggcccagcttgggggcccagaag

SEQ ID NO: 44 - DNA, 603 bp, Homo sapiens
ccaagatgcacaccggctgcaccatgtcagcagcctggcctggctggacgagcacacgctggtcacgacctcccatgatgcctctgtcaaggagtggacaatcacctactgaggagccccacccccgcctctggatggaccgaatcagggactagagtttaactgcagcggaacatgtcatttctctatttctgtgacgcgcccccatgcccccaccccaccacaagaggcaggagggcccagtcatgacccttgtctctgcagggtgtctgtacacgttcttctgaaagctttagacagtaacagtttgcacatgaaaaataaagcgagcacctaaacaatgtgtggagcataactaaaacccacagcccaaccaaaccttgagaatgcgaaacattccagaggcagtagcctccaaagcacacagagcccctggccccgccgcggctctcactgtctgtcaggggaggttgtacaggtgaatgagccggggggctcatgttcctgcctgcagaacatttctgtactagtgagaagagggaatatgcattgcagttcagcaaagccggaattctgtgttgaacagatgtctgtctccctagt

SEQ ID NO: 45 - DNA, 551 bp, Homo sapiens
gttatctgcatctcaaaagaaaatgcttacccacaggaactgttaactcaggggttcttaacttggggtccatcaccccagggggtccatagttggacttcagagggtctatgaaacccctaaaactgtcagtatttaatgtatttattcttgtatgttttttccagagcattaaagctttcataaggttctcaaaggtctcagacctacaaagagttaaaacaaacagacaaacaaaaaaaaacactactattttaaatagtggaactttcagcccagcgtttctgcaatgcagagtgaagtggatactgggcagttcgagacaggtttttaatcataagtggtcttttcaaatgtccatcaattgatggggaaggctggcacccaccaagaagtggaagtcctcagaaattctcggcacaccctagagtattgtacaaccaacacccccacataactttgtcccctcttccccaacaacccagagcaggtgttgcagacaggagggccacagcgtgtggaagtaaagactttggagctagagatgcctt

SEQ ID NO: 46 - DNA, 2797 bp, Homo sapiens
aagatggcggaccttgattcgcctccgaagctgtcaggggtgcagcagccgtctgagggggtgggaggtggccgctgctccgaaatctccgctgagctcattcgctccctgacagagctgcaggagctggaggctgtatacgaacggctctgcggcgaggagaaagtggtggagagagagctggatgctcttttggaacagcaaaacaccattgaaagtaagatggtcactctccaccgaatgggtcctaatctgcagctgattgagggagatgcaaagcagctggctggaatgatcacctttacctgcaacctggctgagaatgtgtccagcaaagttcgtcagcttgacctggccaagaaccgcctctatcaggccattcagagagctgatgacatcttggacctgaagttctgcatggatggagttcagactgctttgaggagtgaagattatgagcaggctgcagcacatattcatcgctacttgtgcctggacaagtcggtcattgagctcagccgacagggcaaaggggggagcatgattgatgccaacctgaaattgctgcaggaagctgagcaacgtctcaaagccattgtggcagagaagtttgccattgccaccaaggaaggtgatttgccccaggtggagcgcttcttcaagatcttcccactgctgggtttgcatgaggagggattaagaaggttctcggagtacctttgcaagcaggtggccagtaaagctgaggagaatctgctcatggtgctggggacagacatgagtgatcggagagctgcagtcatctttgcagatacacttactcttctgtttgaagggattgcccgcattgtggaggcccaccagccaatagtggagacctattatgggccagggagactctataccctgatcaaatatctgcaggtggaatgtgacagacaggtggagaaggtggtagacaagttcatcaagcaaagggactaccaccagcagttccggcatgttcagaacaacctgatgagaaattctacaacagaaaaaatcgaaccaagagaactggaccccatcctgactgaggtcaccctgatgaacgcccgcagtgagctatacttacgcttcctcaagaagaggattagctctgattttgaggtgggagactccatggcctcagaggaagtaaagcaagagcaccagaagtgtctggacaaactcctcaataactgccttttgagctgtaccatgcaggagctaattggcttatatgttaccatggaggagtacttcatgagggagactgtcaataaggctgtggctctggacacctatgagaagggccagctgacatccagcatggtggatgatgtcttctacattgttaagaagtgcattgggcgggctctgtccagctccagcattgactgtctctgtgccatgatcaacctcgccaccacagagctggagtctgacttcagggatgttctgtgtaataagctgcggatgggctttcctgccaccaccttccaggacatccagcgcggggtgacaagtgccgtgaacatcatgcacagcagcctccagcaaggcaaatttgacacaaaaggcatcgagagtactgacgaggcgaagatgtccttcctggtgactctgaacaacgtggaagtctgcagtgaaaacatctccactctgaagaagacactggagagtgactgcaccaagctcttcagccagggcattggaggggagcaggcccaggccaagtttgacggctgcctttctgacttggccgccgtgtccaacaaattccgagacctcttgcaggaagggctgacggagctcaacagcacagccatcaagccacaggtgcagccttggatcaacagctttttctccgtctcccacaacatcgaggaggaagaattcaatgactatgaggccaacgacccttgggtacaacagttcatccttaacctggagcagcaaatggcagagttcaaggccagcctgtccccggtcatctacgacagcctaaccggcctcatgactagccttgttgccgtcgagttggagaaagtggtgctgaaatccacctttaaccggctgggtggtctgcagtttgacaaggagctgaggtcgctcattgcctaccttaccacggtgaccacctggaccatccgagacaagtttgcccggctctcccagatggccaccatcctcaatctggagcgggtgaccgagatcctcgattactggggacccaattccggcccattgacgtggcgcctcacccctgctgaagtgcgccaggtgctggccctgcggatagacttccgcagtgaagatatcaagaggctgcgcctgtagctgcctggatgagcacacctggctcatcacacttgcaggcctgttccctaaggggccccagccaaggagctgagcgaggctgtctggcttgggggagatctgacagcccagacctttctacggctggcagcagagaaacaaagtctggacccactccatgctctgccctcagacctggccaggtgatgctctgggggcagcatctccccaccgagagaagcgggctcctaatgaggtgggaaagccacggcaggcagcgagcagcccaggccagctttctgcatggatggtcagtctcttgccctcaaacactacagcaaacaagctacccctgccagtcctagacaacttgggtacatctggggacctagcagttaggcttgactttgaggagaggctgtgatgtttatgatccctgaataaagctactccttgg

SEQ ID NO: 47 - DNA, 4116 bp, Homo sapiens
cggaggtctccgggtggtatcgccctttcctctttgccagcccgctggcgagccgagccggggcaagatgaggtcgtcctgtgtcctgctcaccgccctggtggcgctggccacctattacgtctacatcccgctgcctggctccgtgtccgacccctggaagctgatgctgctggacgccactttccggggtgcacagcaagtgagtaacctgatccactacctgggactgagccatcacctgctggcactgaattttatcattgtttcttttggcaaaaaaagcgcgtggtcttctgcccaagtgaaggtgaccgacacagactttgatggtgtggaagtcagagtgtttgaaggccctccgaagcccgaagagccactgaaacgcagcgtcgtttatatccacggaggaggctgggccttggcaagtgcaaaaatcaggtattatgatgagctgtgtacagcaatggctgaggaattgaatgctgtcattgtttccattgaatacaggctagttccaaaggtttattttcctgagcaaattcatgatgttgtacgggccacaaagtatttcctgaagccagaagtcttacagaagtatatggttgatccaggcagaatttgcatttctggtgacagtgctggtggaaatctggctgctgcccttggacaacagtttactcaagatgccagcctaaaaaataagctcaaactacaagctttaatttatccagttcttcaagctttagattttaacacaccatcttatcagcaaaatgtgaacaccccaatcctgccccgctatgtcatggtgaagtattgggtggactacttcaaaggcaactatgactttgtgcaggcaatgatcgttaacaatcacacttcacttgatgtggaagaggctgctgctgtcagggcccgtctaaactggacatccctcttgcctgcatccttcacaaagaactacaagcctgttgtacagaccacaggcaatgccaggattgtccaggagcttcctcagttgctggatgcccgctccgccccactcattgcagaccaggcagtgctgcagctcctcccaaagacctacattctgacgtgtgagcatgatgtcctcagagacgatggcatcatgtatgccaagcgtttggagagtgccggtgtggaggtgaccctggatcactttgaggatggctttcacggatgtatgattttcactagctggcccaccaacttctcagtgggaatccggactaggaatagttacatcaagtggctagatcaaaacctgtaaaggagcaaaacttccagaagcctcgagcccctcttgacctcctacacctgctttggaaagacatgcactttttagttgactaattcttcctcccattcccctctacttgcgagttatggaatttctattccataactgaagtctttatgataacctaatttttaaaaatgaatttgactaacttaagtgcaaaacatgtaaatttggttcccagagtgggccaatctctctgttcttgttatcttagccaactatactcatacctacagctacagaaagcaggactaggaactggaaataactttgggtcctgccttcattaggacgttctttttagaagcagttcttccagctctggatcatagagtgacctttaataagttaaaaaaacgaggactccttaattctgctagagttaaccttgagttcagagcagtattaaatgcgtgcactttcaggtcagtactggggaccaagtaccctctggtcttttgtgaatggatggttttgtttcctatgggaattttggcaaaggttttctggaaagaacaagtttctcaaaggactttcttcctctagaatgttcattttatgagatcgctatctgtaagtccagttggattacaggaatacttgaaagttactttctaccactattagaaaatatgaagtcgcatgcactggatatctatatatcattaggtttttgttgtgtttttggttatgctgtcccccttctccttggggagatatttgggagcaaacttatttagatttagagtaaacttttcattatagagcaagtaaaaacagacaaatgaaacaacctagtgtttcacataaaaatacttctgacataaagtaccaagagcagtgtgaatatacttggcatagtcaaaaaagaaaatacatttaatattagttaaaaattgttaaaaatacctttagaaggtctagtctattattgaaaactcaattttttcacttatatggctttaaaatggagctattttgctacaatataatgtattgtttatttttttaagttatttaatgttaatatacatagctagacttaaggtttttcagaaagatgtccataataaatattaaaaacaatggtatttttaaaaaaactgccttagggttttaaaaccttccctacagttataaccacgtgtaattttgtggaaatgatataacagctattaatactactataacataggcataaatattttcgtgtttatatgcatatacaagttaaaataattagaaactatgactgcgcctagtaaagtcatctaggtttatagttcagtagcttaggcaaggcacacactgctcatctccgctttttagggtcagaggaacacaagctcatgttctgagtgaagggcgtacactggcacctggtgttgcctagatcccccatctcctccttccagccaggtctggaagtttcaacagcccaagcttaacttcatgtaaagtcttcactgccagtgggaacatctttgacacaacaagacactccaattgtgatttgagttgaggatctctgcctgccttcctgccgtccttccttcttccccgatccatgctacttttaggggctgcggagagcagcagcagagctgagtaatgatacagggcaccacggagagaaagtagaaccatttcactcctgggaagatggggtatttcccacttccagcaacgaaataacaaatgaaaagttgcatacttattgatgtattgtatgagccagtagcattttatgtacaaaacagaagtcaatgcaacagtatgtatgtgtgcctgtgtgtgtataaaaataaccattgaagctaacttgctaatgtacttaggcaagccacttcccatctctgggcctcgtctttcctccctctaaaatcaaagagctgaattatgtgatccttgaggtctcttccacttataataccaactgtcttgtcagactggcaaattatattggcctctccttatgtggtggtttttttggtaggtcatagttccttatacacggacacctgcatcatcgaaggtctttttttcctaaaaaaaaaaaatgggattttagttcttattctgtgataactatcctcctcatataatactattctttttgacaccatttgaaggaaccaatatttggaccttattttgaggttgtctgtctcgaagaaaaagaaaataaaatgtataggcagggttccttcaattggcattttccccagaattgtgagccaaagcctatagtaattgcagacagcaaatgattccggatctctaaaaggctctctcagatgaaaagggagtaaaggaaaaaagagggaggtcaaccactgtttctgataatgtacttgagtttcattgttcttttagtttgtattcttataaaaaatgtttacactctgcagattgattttttttttttagtactgtggctttcttttcctattttatgaaaaaaatgataatctttttgtaaaattgtctgtgaaatataaacattaatatataaagaaaaaccttgaagtgctgtatagtgaagtataaattaatgttttattgatttgtgaagaatttaagactattatataattatcttggtggatctattttatgcatgaccttttaacctttgactttgcttatttcccactacgaaggggaaggtagattttatgaatgattttaatagcaaatatattttataaagtgaaaatccagtgtggaggtagcaaagcatctatctattctgaatcatgtttggaaataaaattgctccatctggg

SEQ ID NO: 48 - DNA, 624 bp, Homo sapiens
cttcataccttttccacatccagatttcatgtgcgttcatggagaagatcacttgaggccatttggtacacatctctggaggctgagtcggttcatgaggtctcttatcaaaaatattactcagtttgcaagactgcattgtaactttaacatacactgtgactgacgtttctcaaagttcatattgtgtggctgatctgaagtcagtcggaatttgtaaacagggtagcaaacaagatatttttcttccatgtatacaataatttttttaaaaagtgcaatttgcgttgcagcaatcagtgttaaatcatttgcataagatttaacagcattttttataatgaatgtaaacattttaacttaatggtacttaaaataatttaaaagaaaaatgttaacttagacattcttatgcttcttttacaactacatcccattttatatttccaattgttaaagaaaaatatttcaagaacaaatcttctctcaggaaaattgcctttctctatttgttaagaatttttatacaagaacaccaatataccccctttattttactgtggaatatgtgctggaaaaattgcaacaacactttactacctaacggatagcatttgtaaatac

SEQ ID NO: 49 - DNA, 395 bp, Homo sapiens
gcggctacggcagtacgcggagaagaaggccaagaagcctgcactggtggccaagtcctccatcctgctggatgtcaagccttgggatgatgagacggacatggctcagctggaggcctgtgtgcgctctatccagctggacgggctggtctggggggcttccaagctggtgcccgtgggctacggtatccggaagctacagattcagtgtgtggtggaggacgacaaggtggggacagacttgctggaggaggagatcaccaagtttgaggagcacgtgcagagtgtcgatatcgcagctttcaacaagatctgaagcctgtgtgtgtacgtgcgcgcgtgcgtgaggccctgccacgattaaagactgagaccggcaaaaaaaaaaaaaaaaa

SEQ ID NO: 50 - DNA, 574 bp, Homo sapiens
aaagaaaggagatgagtatattattaatggtcagaagatgtggataaccaacggaggaaaagctaattggtattttttattggcacgttctgatccagatcctaaagctcctgctaataaagcctttactggattcattgtggaagcagataccccaggaattcagattgggagaaaggaattaaacatgggccagcgatgttcagatactagaggaattgtcttcgaagatgtgaaagtgcctaaagaaaatgttttaattggtgacggagctggtttcaaagttgcaatgggagcttttgataaaaccagacctgtagtagctgctggtgctgttggattagcacaaagagctttggatgaagctaccaagtatgccctggaaaggaaaactttcggaaagctacttgtagagcaccaagcaatatcatttatgctggctgaaatggcaatgaaagttgaactagctagaatgagttccagagagcagcttgggaggttgattctggtcgtcgaaatacctattatgcttctattgcaaaggcatttgctggagatattgcaaatcagttag

SEQ ID NO: 51 - DNA, 433 bp, Homo sapiens
cggcgccactgctgtcctgctggcttccgctgcgcagccaggggtaccaagtgtttgcgcagggaggccccgcgctgggacgcccctttgagggacccagccttgagacagctgctgtgagggacagtactgaagactctgcagccctcgggaccccactcggagggtgccctctgctcaggcctccctagcacctccccctaaccaaattctccctggaccccattctgagctccccatcaccatgggaggtggggcctcaatctaaggccttccctgtcagaagggggttgtggcaaaagccacattacaagctgccatcccctccccgtttcagtggaccctgtggccaggtgcttttccctatccacaggggtgtttgtgtgtgtgcgcgtgtgcgtttcaataaagtttgtacactttcttaaaaaaa

SEQ ID NO: 52 - DNA, 446 bp, Homo sapiens
cggcgtcgggcggtgcggatgtcgggctgggcggacgagcgcggcggcgagggcgacgggcgcatctacgtggggaaccttccgaccgacgtgcgcgagaaggacttggaggacctgttctacaagtacggccgcatccgcgagatcgagctcaagaaccggcacggcctcgtgcccttcgccttcgtgcgcttcgaggacccccgagatgcagaggatgctatttatggaagaaatggttatgattatggccagtgtcggcttcgtgtggagttccccaggacttatggaggtcggggtgggtggccccgtggtgggaggaatgggcctcctacaagaagatctgatttccgagttcttgtttcaggacttcctccgtcaggcagctggcaggacctgaaggatcacatgcgagaagctggggatgtctgttatgctgatgtgca

SEQ ID NO: 53 - DNA, 4632 bp, Homo sapiens
gagccgtcaccacagtaggtccctcggctcagtcggcccagcccctctcagtcctccccaacccccacaaccgcccgcggctctgagacgcggccccggcggcggcggcagcagctgcagcatcatctccaccctccagccatggaagacctggaccagtctcctctggtctcgtcctcggacagcccaccccggccgcagcccgcgttcaagtaccagttcgtgagggagcccgaggacgaggaggaagaagaggaggaggaagaggaggacgaggacgaagacctggaggagctggaggtgctggagaggaagcccgccgccgggctgtccgcggccccagtgcccaccgcccctgccgccggcgcgcccctgatggacttcggaaatgacttcgtgccgccggcgccccggggacccctgccggccgctccccccgtcgccccggagcggcagccgtcttgggacccgagcccggtgtcgtcgaccgtgcccgcgccatccccgctgtctgctgccgcagtctcgccctccaagctccctgaggacgacgagcctccggcccggcctccccctcctcccccggccagcgtgagcccccaggcagagcccgtgtggaccccgccagccccggctcccgccgcgcccccctccaccccggccgcgcccaagcgcaggggctcctcgggctcagtggatgagaccctttttgctcttcctgctgcatctgagcctgtgatacgctcctctgcagaaaatatggacttgaaggagcagccaggtaacactatttcggctggtcaagaggatttcccatctgtcctgcttgaaactgctgcttctcttccttctctgtctcctctctcagccgcttctttcaaagaacatgaataccttggtaatttgtcaacagtattacccactgaaggaacacttcaagaaaatgtcagtgaagcttctaaagaggtctcagagaaggcaaaaactctactcatagatagagatttaacagagttttcagaattagaatactcagaaatgggatcatcgttcagtgtctctccaaaagcagaatctgccgtaatagtagcaaatcctagggaagaaataatcgtgaaaaataaagatgaagaagagaagttagttagtaataacatccttcataatcaacaagagttacctacagctcttactaaattggttaaagaggatgaagttgtgtcttcagaaaaagcaaaagacagttttaatgaaaagagagttgcagtggaagctcctatgagggaggaatatgcagacttcaaaccatttgagcgagtatgggaagtgaaagatagtaaggaagatagtgatatgttggctgctggaggtaaaatcgagagcaacttggaaagtaaagtggataaaaaatgttttgcagatagccttgagcaaactaatcacgaaaaagatagtgagagtagtaatgatgatacttctttccccagtacgccagaaggtataaaggatcgttcaggagcatatatcacatgtgctccctttaacccagcagcaactgagagcattgcaacaaacatttttcctttgttaggagatcctacttcagaaaataagaccgatgaaaaaaaaatagaagaaaagaaggcccaaatagtaacagagaagaatactagcaccaaaacatcaaacccttttcttgtagcagcacaggattctgagacagattatgtcacaacagataatttaacaaaggtgactgaggaagtcgtggcaaacatgcctgaaggcctgactccagatttagtacaggaagcatgtgaaagtgaattgaatgaagttactggtacaaagattgcttatgaaacaaaaatggacttggttcaaacatcagaagttatgcaagagtcactctatcctgcagcacagctttgcccatcatttgaagagtcagaagctactccttcaccagttttgcctgacattgttatggaagcaccattgaattctgcagttcctagtgctggtgcttccgtgatacagcccagctcatcaccattagaagcttcttcagttaattatgaaagcataaaacatgagcctgaaaaccccccaccatatgaagaggccatgagtgtatcactaaaaaaagtatcaggaataaaggaagaaattaaagagcctgaaaatattaatgcagctcttcaagaaacagaagctccttatatatctattgcatgtgatttaattaaagaaacaaagctttctgctgaaccagctccggatttctctgattattcagaaatggcaaaagttgaacagccagtgcctgatcattctgagctagttgaagattcctcacctgattctgaaccagttgacttatttagtgatgattcaatacctgacgttccacaaaaacaagatgaaactgtgatgcttgtgaaagaaagtctcactgagacttcatttgagtcaatgatagaatatgaaaataaggaaaaactcagtgctttgccacctgagggaggaaagccatatttggaatcttttaagctcagtttagataacacaaaagataccctgttacctgatgaagtttcaacattgagcaaaaaggagaaaattcctttgcagatggaggagctcagtactgcagtttattcaaatgatgacttatttatttctaaggaagcacagataagagaaactgaaacgttttcagattcatctccaattgaaattatagatgagttccctacattgatcagttctaaaactgattcattttctaaattagccagggaatatactgacctagaagtatcccacaaaagtgaaattgctaatgccccggatggagctgggtcattgccttgcacagaattgccccatgacctttctttgaagaacatacaacccaaagttgaagagaaaatcagtttctcagatgacttttctaaaaatgggtctgctacatcaaaggtgctcttattgcctccagatgtttctgctttggccactcaagcagagatagagagcatagttaaacccaaagttcttgtgaaagaagctgagaaaaaacttccttccgatacagaaaaagaggacagatcaccatctgctatattttcagcagagctgagtaaaacttcagttgttgacctcctgtactggagagacattaagaagactggagtggtgtttggtgccagcctattcctgctgctttcattgacagtattcagcattgtgagcgtaacagcctacattgccttggccctgctctctgtgaccatcagctttaggatatacaagggtgtgatccaagctatccagaaatcagatgaaggccacccattcagggcatatctggaatctgaagttgctatatctgaggagttggttcagaagtacagtaattctgctcttggtcatgtgaactgcacgataaaggaactcaggcgcctcttcttagttgatgatttagttgattctctgaagtttgcagtgttgatgtgggtatttacctatgttggtgccttgtttaatggtctgacactactgattttggctctcatttcactcttcagtgttcctgttatttatgaacggcatcaggcacagatagatcattatctaggacttgcaaataagaatgttaaagatgctatggctaaaatccaagcaaaaatccctggattgaagcgcaaagctgaatgaaaacgcccaaaataattagtaggagttcatctttaaaggggatattcatttgattatacggatctttatttttagccatgcactgttgtgaggaaaaattacctgtcttgactgccatgtgttcatcatcttaagtattgtaagctgctatgtatggatttaaaccgtaatcatatctttttcctatctgaggcactggtggaataaaaaacctgtatattttactttgttgcagatagtcttgccgcatcttggcaagttgcagagatggtggagctagaaaaaaaaaaaaaaaagcccttttcagtttgtgcactgtgtatggtccgtgtagattgatgcagattttctgaaatgaaatgtttgtttagacgagatcataccggtaaagcaggaatgacaaagcttgcttttctggtatgttctaggtgtattgtgacttttactgttatattaattgccaatataagtaaatatagattatatatgtatagtgtttcacaaagcttagacctttaccttccagccaccccacagtgcttgatatttcagagtcagtcattggttatacatgtgtagttccaaagcacataagctagaagaagaaatatttctaggagcactaccatctgttttcaacatgaaatgccacacacatagaactccaacaacatcaatttcattgcacagactgactgtagttaattttgtcacagaatctatggactgaatctaatgcttccaaaaatgttgtttgtttgcaaatatcaaacattgttatgcaagaaattattaattacaaaatgaagatttataccattgtggtttaagctgtactgaactaaatctgtggaatgcattgtgaactgtaaaagcaaagtatcaataaagcttatagacttaaaaaaaaaa

SEQ ID NO: 54 - DNA, 2235 bp, Homo sapiens
gagccgtcaccacagtaggtccctcggctcagtcggcccagcccctctcagtcctccccaacccccacaaccgcccgcggctctgagacgcggccccggcggcggcggcagcagctgcagcatcatctccaccctccagccatggaagacctggaccagtctcctctggtctcgtcctcggacagcccaccccggccgcagcccgcgttcaagtaccagttcgtgagggagcccgaggacgaggaggaagaagaggaggaggaagaggaggacgaggacgaagacctggaggagctggaggtgctggagaggaagcccgccgccgggctgtccgcggccccagtgcccaccgcccctgccgccggcgcgcccctgatggacttcggaaatgacttcgtgccgccggcgccccggggacccctgccggccgctccccccgtcgccccggagcggcagccgtcttgggacccgagcccggtgtcgtcgaccgtgcccgcgccatccccgctgtctgctgccgcagtctcgccctccaagctccctgaggacgacgagcctccggcccggcctccccctcctcccccggccagcgtgagcccccaggcagagcccgtgtggaccccgccagccccggctcccgccgcgcccccctccaccccggccgcgcccaagcgcaggggctcctcgggctcagtggttgttgacctcctgtactggagagacattaagaagactggagtggtgtttggtgccagcctattcctgctgctttcattgacagtattcagcattgtgagcgtaacagcctacattgccttggccctgctctctgtgaccatcagctttaggatatacaagggtgtgatccaagctatccagaaatcagatgaaggccacccattcagggcatatctggaatctgaagttgctatatctgaggagttggttcagaagtacagtaattctgctcttggtcatgtgaactgcacgataaaggaactcaggcgcctcttcttagttgatgatttagttgattctctgaagtttgcagtgttgatgtgggtatttacctatgttggtgccttgtttaatggtctgacactactgattttggctctcatttcactcttcagtgttcctgttatttatgaacggcatcaggcacagatagatcattatctaggacttgcaaataagaatgttaaagatgctatggctaaaatccaagcaaaaatccctggattgaagcgcaaagctgaatgaaaacgcccaaaataattagtaggagttcatctttaaaggggatattcatttgattatacgggggagggtcagggaagaacgaaccttgacgttgcagtgcagtttcacagatcgttgttagatctttatttttagccatgcactgttgtgaggaaaaattacctgtcttgactgccatgtgttcatcatcttaagtattgtaagctgctatgtatggatttaaaccgtaatcatatctttttcctatctgaggcactggtggaataaaaaacctgtatattttactttgttgcagatagtcttgccgcatcttggcaagttgcagagatggtggagctagaaaaaaaaaaaaaaaagcccttttcagtttgtgcactgtgtatggtccgtgtagattgatgcagattttctgaaatgaaatgtttgtttagacgagatcataccggtaaagcaggaatgacaaagcttgcttttctggtatgttctaggtgtattgtgacttttactgttatattaattgccaatataagtaaatatagattatatatgtatagtgtttcacaaagcttagacctttaccttccagccaccccacagtgcttgatatttcagagtcagtcattggttatacatgtgtagttccaaagcacataagctagaagaagaaatatttctaggagcactaccatctgttttcaacatgaaatgccacacacatagaactccaacaacatcaatttcattgcacagactgactgtagttaattttgtcacagaatctatggactgaatctaatgcttccaaaaatgttgtttgtttgcaaatatcaaacattgttatgcaagaaattattaattacaaaatgaagatttataccattgtggtttaagctgtactgaactaaatctgtggaatgcattgtgaactgtaaaagcaaagtatcaataaagcttatagacttaaaaaaaaaa

SEQ ID NO: 55 - DNA, 573 bp, Homo sapiens
ctctgaagtccgcagtggctacaggattcaggccagccagcaggacgactccatgcgggtcctgtactacatggagaaggagctggccaacttcgacccttctcgacctggcccccccagtggccgtgtggagcgggccatgagtgaagtcacctccctccacgaggacgactggcgatctcggccttcccggggccctgccctcaccccgatccgggatgaggagtggggtggccactccccccggagtcccaggggatgggaccaggagcccgccagggagcaggcaggcgggggctggcgggccaggcggccccgggcccgctccgtggacgccctggacgacctcaccccgccgagcaccgccgagtcagggagcaggtctcccacgagtaatggtgggaggagaagccgggcctacatgcccccgcggagccgcagccgggacgacctctatgaccaagacgactcgagggacttcccacgctcccgggacccccactacgacgacttcaggtctcgggagcgccctcctgccgaccccaggtcccaccaccaccgtacccgggaccc

SEQ ID NO: 56 - DNA, 389 bp, Homo sapiens
ctgggctgcgcggtctgagcgcttgttacaccccgcgcaggattcggacggagagcgcgaggactcggcggctgagcgcgcccgacagcagctagaggcgctgctcaacaagactatgcgcattcgcatgacagatggacggacactggtcggctgcttcctctgcactgaccgtgactgcaatgtcatcctgggctcggcgcaggagttcctcaagccgtcggattccttctctgccggggagccccgtgtgctgggcctggccatggtacccggacaccacatcgtttccattgaggtgcagagggagagtctgaccgggcctccgtatctctgaccacgatggcgcttacctttcagacttcattaaacttatgaccgaaaaaaaa

SEQ ID NO: 57 - DNA, 624 bp, Homo sapiens
atattttactgggatgtttaatattggagtagcattgcatgcttgtggagtggcaacagacatggtgattgagcactgtatcaaaacacgggcttccttcgtcacatgcccttgctgttatggtttcattcagaacacctcaaagttcaattttccaaaaagtgaacaattcaagaaaactttatcatacaaggaacacatgattctgtgcagatttgcagaccagacagctgtccagctcccaccccaacgaaggctcataggaaaacagtgcatgtgcttggtggatctggatcgagcaagagctgcagaagaatgtggatactccgttcaagtgatatccatggagccagagagctgctctcccaaaaataacatgattgtgggagtccccatttaaaatgagatattcacatttgatattttgccatccgtcttcacgttggatgcccagtggcattcaggaggttcttggcataactaggaaacagcattagccatcttgaacctttgtgctcaggaaggaaagcaacagggaaatcttggaagtaaaggctccctgcaaagcatcacaaatgctttacaatgtgtgattaaaggactgctggtttttatagtgagaat

SEQ ID NO: 58 - DNA, 85 bp, Homo sapiens
gttggagcggctgtcgccatgttgtcggtagcagcccgctcgggcccgttcgcgcccgtcctgtcggccacgtcccgcggggtgg

SEQ ID NO: 59 - DNA, 624 bp, Homo sapiens
ggaggtttctatggaggctgcaatgaagccctgatgaagcttgagttggtccatcatgggcccatggcagttgcttttgaagtatatgatgacttcctccactacaaaaaggggatctaccaccacactggtctaagagaccctttcaacccctttgagctgactaatcatgctgttctgcttgtgggctatggcactgactcagcctctgggatggattactggattgttaaaaacagctggggcaccggctggggtgagaatggctacttccggatccgcagaggaactgatgagtgtgcaattgagagcatagcagtggcagccacaccaattcctaaattgtagggtatgccttccagtatttcataatgatctgcatcagttgtaaaggggaattggtatattcacagactgtagactttcagcagcaatctcagaagcttacaaatagatttccatgaagatatttgtcttcagaattaaaactgcccttaattttaatatacctttcaatcggccactggccatttttttctaagtattcaattaagtgggaattttctggaagatggtcagctatgaagtaatagagtttgcttaatcatttgtaattcaaacatg

SEQ ID NO: 60 - DNA, 2734 bp, Homo sapiens
ccggcgctatgtacgccctcttcctcctggccagcctcctgggcgcggctctagccggcccggtccttggactgaaagaatgcaccaggggctcggcagtgtggtgccagaatgtgaagacggcgtccgactgcggggcagtgaagcactgcctgcagaccgtttggaacaagccaacagtgaaatcccttccctgcgacatatgcaaagacgttgtcaccgcagctggtgatatgctgaaggacaatgccactgaggaggagatccttgtttacttggagaagacctgtgactggcttccgaaaccgaacatgtctgcttcatgcaaggagatagtggactcctacctccctgtcatcctggacatcattaaaggagaaatgagccgtcctggggaggtgtgctctgctctcaacctctgcgagtctctccagaagcacctagcagagctgaatcaccagaagcagctggagtccaataagatcccagagctggacatgactgaggtggtggcccccttcatggccaacatccctctcctcctctaccctcaggacggcccccgcagcaagccccagccaaaggataatggggacgtttgccaggactgcattcagatggtgactgacatccagactgctgtacggaccaactccacctttgtccaggccttggtggaacatgtcaaggaggagtgtgaccgcctgggccctggcatggccgacatatgcaagaactatatcagccagtattctgaaattgctatccagatgatgatgcacatgcaggatcagcaacccaaggagatctgtgcgctggttgggttctgtgatgaggtgaaagagatgcccatgcagactctggtccccgccaaagtggcctccaagaatgtcatccctgccctggaactggtggagcccattaagaagcacgaggtcccagcaaagtctgatgtttactgtgaggtgtgtgaattcctggtgaaggaggtgaccaagctgattgacaacaacaagactgagaaagaaatactcgacgcttttgacaaaatgtgctcgaagctgccgaagtccctgtcggaagagtgccaggaggtggtggacacgtacggcagctccatcctgtccatcctgctggaggaggtcagccctgagctggtgtgcagcatgctgcacctctgctctggcacgcggctgcctgcactgaccgttcacgtgactcagccaaaggacggtggcttctgcgaagtgtgcaagaagctggtgggttatttggatcgcaacctggagaaaaacagcaccaagcaggagatcctggctgctcttgagaaaggctgcagcttcctgccagacccttaccagaagcagtgtgatcagtttgtggcagagtacgagcccgtgctgatcgagatcctggtggaggtgatggatccttccttcgtgtgcttgaaaattggagcctgcccctcggcccataagcccttgttgggaactgagaagtgtatatggggcccaagctactggtgccagaacacagagacagcagcccagtgcaatgctgtcgagcattgcaaacgccatgtgtggaactaggaggaggaatattccatcttggcagaaaccacagcattggtttttttctacttgtgtgtctgggggaatgaacgcacagatctgtttgactttgttataaaaatagggctcccccacctcccccatttctgtgtcctttattgtagcattgctgtctgcaagggagcccctagcccctggcagacatagctgcttcagtgccccttttctctctgctagatggatgttgatgcactggaggtcttttagcctgcccttgcatggcgcctgctggaggaggagagagctctgctggcatgagccacagtttcttgactggaggccatcaaccctcttggttgaggccttgttctgagccctgacatgtgcttgggcactggtgggcctgggcttctgaggtggcctcctgccctgatcagggaccctccccgctttcctgggcctctcagttgaacaaagcagcaaaacaaaggcagttttatatgaaagattagaagcctggaataatcaggctttttaaatgatgtaattcccactgtaatagcatagggattttggaagcagctgctggtggcttgggacatcagtggggccaagggttctctgtccctggttcaactgtgatttggctttcccgtgtctttcctggtgatgccttgtttggggttctgtgggtttgggtgggaagagggccatctgcctgaatgtaacctgctagctctccgaaggccctgcgggcctggcttgtgtgagcgtgtggacagtggtggccgcgctgtgcctgctcgtgttgcctacatgtccctggctgttgaggcgctgcttcagcctgcacccctcccttgtctcatagatgctccttttgaccttttcaaataaatatggatggcgagctcctaggcctcgggcttcctggtagagggcggcatgccgaagggtctgctgggtgtggattggatgctggggtgtgggggttggaagctgtctgtggcccacttgggcacccacgcttctgtccacttctggttgccaggagacagcaagcaaagccagcaggacatgaagttgctattaaatggacttcgtgatttttgttttgcactaaagtttctgtgatttaacaataaaattctgttagccag

SEQ ID NO: 61 - DNA, 524 bp, Homo sapiens
caccaaatggcggatgacgccggtgcagcgggggggcccgggggccctggtggccctgggatggggaaccgcggtggcttccgcggaggtttcggcagtggcatccggggccggggtcgcggccgtggacggggccggggccgaggccgcggagctcgcggaggcaaggccgaggataaggagtggatgcccgtcaccaagttgggccgcttggtcaaggacatgaagatcaagtccctggaggagatctatctcttctccctgcccattaaggaatcagagatcattgatttcttcctgggggcctctctcaaggatgaggttttgaagattatgccagtgcagaagcagacccgtgccggccagcgcaccaggttcaaggcatttgttgctatcggggactacaatggccacgtcggtctgggtgttaagtgctccaaggaggtggccaccgccatccgtggggccatcatcctgccaagctctccatcgtccccgtgcgcagaggctactgggggaacaag

SEQ ID NO: 62 - DNA, 473 bp, Homo sapiens
gggcctgctgctgcgcagcctgcaggagcgcaaccaggagcaggagaaggtggagcggcgccgtcaggtccccttccacctgcacatcaacctggagctgctggagtgtgtctacctggtgtctgccatgctcctggagatcccctacatggccgcccatgagagcgatgcccgccgacgcatgatcagcaagcagttccaccaccagctgcgcgtgggcgagcgacagcccctgctgggtccccctgagtccatgcgggaacatgtggtcgctgcctccaaggccatgaagatgggtgactggaagacctgtcacagttttatcatcaatgagaagatgaatgggaaagtgtgggaccttttccccgaggctgacaaagtccgcaccatgctggttaggaagatccaggaagagtcactgaggacctacctcttcacctacagcagtgtctatgactccatcagcattggag

SEQ ID NO: 63 - DNA, 523 bp, Homo sapiens
  misc_feature 18, 35, 225, 231, 257, 477, 481: n = A,T,C or G
atgtaacaaggatctccngtccacaagttgaaganggcgatagtcgttttcttgcaaatgaagttttacaggagtggtatgtgctgctggtgctgaacctcttccgagaaatggagatcaatggcatgaaatcagacagggtagattacctcggataccacaagtgctttcccaagaatttacagagttgctaaaagttatgattcatccatatccagagagaanaccttnagcaatggcactggtaaagcattcantattgctgtccgcttctagaaagagtgcagaacaattacgaatagaattgaatgccgaaaagttcaaaaattcacttttacaaaaagaactcaagaaagcacagatggcaaaagctgcagctgaggaaagagcactcttcactgaccggatggccactaggtccaccacccagagtaatagaacatctcgacttattggaaagaaaatgaaccgctctgncagncttactatatactgagctactcctttcccacctccccctgaa

SEQ ID NO: 64 - DNA, 574 bp, Homo sapiens
ggttcccgagggctggctcatcttcgtggccgagcaggaggagctctacgtccgcgtgcagaacgggttccggaaggtccagctggaggcccggacaccactcccacgagggacggacaatgaagtggccgccttgcagccccccgtggtgcagctgcacgacagcaacccctacccgcggcgggagcacccccaccccaccgcgcggccctggcgggcagatgacatcctggccagcccccctcgcctgcccgagccccagccctaccccggagccccgcaccacagctcctacgtgcacctgcggccggcacgacccacaagcccacccgcccacagccaccgcgacttccagccggtgctccacctggttgcgctcaacagccccctgtcaggcggcatgcggggcatccgcggggccgacttccagtgcttccagcaggcgcgggccgtggggctggcgggcaccttccgcgccttcctgtcctcgcgcctgcaggacctgtacagcatcgtgcgccgtgccgaccgcgcagccgtgcccatcgtcaacctcaaggacgagctgctgttt

SEQ ID NO: 65 - DNA, 573 bp, Homo sapiens
cgcccgggactaagccggggagcgcatcccggctactgcgggtcctgggtcttcacctgcggagccttacggcagctgagcggtgggagggacctgagccgcggcgctaggatgggaaacagtgcgctccgcgctcatgtggaaacggcgcagaaaactggtgtctttcagcttaaggaccgagggctgaccgagttccccgcagacttgcagaagctgacgagcaatctcaggaccatcgacttgtccaacaacaagatcgaaagcctaccgcctttgctgataggaaagttcactctgctgaagagcctctccctgaacaacaacaaactgactgttctgcctgatgagatatgcaatctgaaaaaactagagacgctaagcctaaacaacaatcaccttagagagctgccgtctacctttgggcaactctctgccctcaagaccctgagcctctctgggaaccaactgggagcattacctccccaactttgtagcctacggcacctggatgtgatggatctctctaagaaccagattcgaagtatacctgactcagtgggagagctgcaa

SEQ ID NO: 66 - DNA, 4182 bp, Homo sapiens
atgctggtgggccagggcgcggggccgctggggcccgcggtggtcaccgccgcggtggtgctgctgctgagcggcgtggggccggcgcacggctcgcgcgacctcgtggtgggctgcggtggcttcgtcaagtcggacgtggagatcaactactctctcatcgagataaagctgtacaccaagcatgggactttgaaataccagacagactgtgcccctaataatggttactttatgatccctttgtatgataagggggatttcattctgaagattgagcctcccctagggtggagttttgagccgacgaccgtggagctccatgtggatggagtcagtgacatctgcacaaagggtggggacatcaactttgtcttcactgggttctctgtgaatggcaaggtcctcagcaaagggcagcccctgggtcctgcgggagttcaggtgtctctgagaaacactgggaccgaagcaaagatccagtccacagttacacagcctggcggaaagtttgcattttttaaagttctgcctggagattatgaaatcctcgcaactcatccaacctgggcgttgaaagaggcaagcaccacagtgagtgtaaccaactccaatgccaatgcggccagtcccctcatagttgctggctacaatgtgtctggctctgtccgaagtgatggggagcccatgaaaggcgtgaagtttcttctcttttcttctttagtaactaaagaggatgtcctgggctgcaatgtctcaccagtgcctgggttccagccccaagacgagagtctggtgtatttgtgctacacggtctccagagaagatggctcgttctctttctattccttgccaagtgggggctacactgtgattccgttctatcgaggggagaggattacctttgatgtggcgccttccagacttgacttcacagtggagcatgacagcttgaaaatcgagcccgtgttccacgtcatgggattctccgtcaccgggagggtcttgaacggacccgaaggagatggtgttccagaagcagtagtcaccctgaataaccaaatcaaagttaaaacaaaagctgatggctcattccgccttgagaacataaccacagggacatacaccatccatgctcagaaagagcacctctactttgaaacggtcaccatcaaaattgcaccgaacacacctcagctggctgacattattgcaacagggttcagtgtctgtggtcagatatcaatcattcgcttccccgacaccgtcaagcagatgaataaatacaaagttgtcctgtcatctcaagacaaggacaagtctttggtcaccgtggagacagatgctcatggatcattttgttttaaagcaaaaccagggacttacaaagtgcaggtgatggttcctgaggcagaaaccagagcagggctgacgttgaaaccccagacatttcctcttactgtgaccaacaggcccatgatggatgtggcctttgtacagttcttggcatcagtttctgggaaagtctcttgcttgaacacctgtggtgacttgctggtgactctacagtccctgagccgccagggtgagaagcggagcctccagctctccggcaaggtcaacgccatgactttcacctttgacaacgtgctccctggaaaatacaaaataagcatcatgcatgaggattggtgctggaagaacaagagcctggaggtggaagtgctggaggatgacatgtctgcagttgagttcaggcagacgggctacatgctgagatgttccctgtctcacgccatcactctggaattttatcaggatggaaatgggcgtgagaatgtggggatttatagcctcttcaaaggagtcaaccgattctgcctgtccaagcctggtgtgtacaaagtgacccctcgctcctgccaccggtttgagcaagcgttctatatctatgacacgtcttcacctagtatctttacattgacagccattcgccaccatgtccttggaactatcaccaccgacaaaatgatggatgtcactgtgactatcaagtcttccatcgacagtgaacccgccttggtcttaggccctctgaagtctgtgcaggagctgcggagggagcagcagctggctgagatcgaggcccgcaggcaggagagggagaaaaacggcaatgaggaaggcgaagaaagaatgaccaagcctcccgtgcaggagatggtagatgagttacaaggccccttctcgtatgatttctcttactgggcgcggtctggagagaaaatcactgttacaccgtcatctaaagagctgctcttttatcccccttcaatggaagccgttgtcagtggagaaagctgcccagggaagctgatcgagatccatgggaaggcaggcctgtttttagaaggccagatccaccccgagttggaaggagtcgagattgtcatcagtgaaaagggggcaagttcaccgctgatcacagtctttactgatgacaaaggtgcctacagtgttggccccctgcacagtgacctggagtacacggtgacctcacagaaggagggctatgttctgactgcggtggaaggaaccatcggagacttcaaggcctatgccctggcaggcgtaagctttgagataaaagctgaggatgaccagcccctcccgggagtcctcttatccctgagcggtggcctgtttcgttccaacctcttgacccaggacaacggcattctgacattctcaaacctgagccctggccagtattacttcaaacccatgatgaaggagttccggtttgagccatcctcacagatgatcgaggtgcaggaaggccagaacctgaagatcaccatcacggggtaccgaaccgcttacagttgctatggcacagtgtcttccttaaacggagagcccgaacaaggggttgccatggaagcggtgggccagaacgactgcagcatttacggagaagacaccgtgacagacgaagagggcaagttcagattacgtggattgctgccgggatgtgtgtaccacgttcagctcaaggcagaaggcaacgaccacattgagcgggcgctcccccaccatagggtgattgaggttgggaataatgacatcgatgatgtaaacatcatagttttccggcagattaatcaatttgatttaagtggaaatgtgatcacttcctctgaataccttcctacattatgggtcaagctttacaaaagcgaaaacctcgacaatccaatccagacagtttcccttggccagtccctgttcttccatttccccccactgctcagagacggcgagaactatgttgtgcttctggactccacactccccagatcccagtatgactacatcttgcctcaagtttctttcaccgcagtgggctaccataaacacaccaccttgatttttaatcccacgaggaagctgcctgaacaggacatcgcacaaggatcctacattgccctgccattgacgctgctggttctgctggccggttacaaccatgacaagctcattcctttgctgctgcagttgacaagccggctacagggagtccgcgcgctcggccaggcagcctctgacaatagcggcccagaagatgcaaagagacaagccaagaaacagaagacaaggcggacttgaggaggaaggggacagttgcagtctcacttgggacaggccacagccaggggtccggccactacccgcccgtgggataaaagccaaaagcatgcgtcagctaacttcagcctgtgctgctgggcccgcaccccatgtcccttgtcactgtgacatcctgcacccatcctcacccctccgtagagcccctcgtgcaatgcaatgaatggaccctcctgtcactctgctgaacagaatttattttctgagtcaaatataatttattattattttcgtcaaagaagtatttaagctgtgctgtggtgtgagaatgtcattcttgatcttcagccttcgtttgcaaggagagttccagttgacgtggtgtttggttccatggcggggtaccctggggattcatctgttttcttcacttccctttgcatctgagatcctgttggaaaccacagcaacctgtattcattattaggaaataaaaatcgaaaaaaaggttcattcttttgtgttgtagttttg

SEQ ID NO: 67 - protein, 392 aa, Homo sapiens
PCQPQTRAQKQPGHTNYSSYSKRKRLTRGRAKNTTSSPCKGRAKRRRQQQVLPLDPAEPEIRLKYISSCKRLRSDSRTPAFSPFVRVEKRDAFTTICTVVNSPGDAPKPHRKPSSSASSSSSSSSFSLDAAGASLATLPGGSILQPRPSLPLSSTMHLGPVVSKALSTSCLVCCLCQNPANFKDLGDLCGPYYPEHCLPKKKPKLKEKVRPEGTCEEASLPLERTLKGPECAAAATAGKPPRPDGPADPAKQGPLRTSARGLSRRLQSCYCCDGREDGGEEAAPADKGRKHECSKEAPAEPGGEAQEHWVHEACAVWTGGVYLVAGKLFGLQEAMKVAVDMMCSSCQEAGATIGCCHKGCLHTYHYPCASDAGCIFIEENFSLKCPKHKRLP

SEQ ID NO: 68 - protein, 125 aa, Homo sapiens
MAGAGPTMLLREENGCCSRRQSSSSAGDSDGEREDSAAERARQQLEALLNKTMRIRMTDGRTLVGCFLCTDRDCNVILGSAQEFLKPSDSFSAGEPRVLGLAMVPGHHIVSIEVQRESLTGPPYL

SEQ ID NO: 69 - protein, 784 aa, Homo sapiens
MADLDSPPKLSGVQQPSEGVGGGRCSEISAELIRSLTELQELEAVYERLCGEEKVVERELDALLEQQNTIESKMVTLHRMGPNLQLIEGDAKQLAGMITFTCNLAENVSSKVRQLDLAKNRLYQAIQRADDILDLKFCMDGVQTALRSEDYEQAAAHIHRYLCLDKSVIELSRQGKGGSMIDANLKLLQEAEQRLKAIVAEKFAIATKEGDLPQVERFFKIFPLLGLHEEGLRRFSEYLCKQVASKAEENLLMVLGTDMSDRRAAVIFADTLTLLFEGIARIVEAHQPIVETYYGPGRLYTLIKYLQVECDRQVEKVVDKFIKQRDYHQQFRHVQNNLMRNSTTEKIEPRELDPILTEVTLMNARSELLRFLKKRISSDFEVGDSMASEEVKQEHQKCLDKLLNNCLLSCTMQELIGLYVTMEEYFMRETVNKAVALDTYEKGQLTSSMVDDVFYIVKKCIGRALSSSSIDCLCAMINLATTELESDFRDVLCNKLRMGFPATTFQDIQRGVTSAVNIMHSSLQQGKFDTKGIESTDEAKMSFLVTLNNVEVCSENISTLKKTLESDCTKLFSQGIGGEQAQAKFDGCLSDLAAVSNKFRDLLQEGLTELNSTAIKPQVQPWINSFFSVSHNIEEEEFNDYEANDPWVQQFILNLEQQMAEFKASLSPVIYDSLTGLMTSLVAVELEKVVLKSTFNRLGGLQFDKELRSLIAYLTTVTTWTIRDKFARLSQMATILNLERVTEILDYWGPNSGPLTWRLTPAEVRQVLALRIDFRSEDIKRLRL

SEQ ID NO: 70 - protein, 430 aa, Homo sapiens
GGLRVVSPFPLCQPAGEPSRGKMRSSCVLLTALVALATYYVYIPLPGSVSDPWKLMLLDATFRGAQQVSNLIHYLGLSHHLLALNFIIVSFGKKSAWSSAQVKVTDTDFDGVEVRVFEGPPKPEEPLKRSVVYIHGGGWALASAKIRYYDELCTAMAEELNAVIVSIEYRLVPKVYFPEQIHDVVRATKYFLKPEVLQKYMVDPGRICISGDSAGGNLAAALGQQFTQDASLKNKLKLQALIYPVLQALDFNTPSYQQNVNTPILPRYVMVKYWVDYFKGNYDFVQAMIVNNHTSLDVEEAAAVRARLNWTSLLPASFTKNYKPVVQTTGNARIVQELPQLLDARSAPLIADQAVLQLLPKTYILTCEHDVLRDDGIMYAKRLESAGVEVTLDHFEDGFHGCMIFTSWPTNFSVGIRTRNSYIKWLDQNL

SEQ ID NO: 71 - protein, 1192 aa, Homo sapiens
MEDLDQSPLVSSSDSPPRPQPAFKYQFVREPEDEEEEEEEEEEDEDEDLEELEVLERKPAAGLSAAPVPTAPAAGAPLMDFGNDFVPPAPRGPLPAAPPVAPERQPSWDPSPVSSTVPAPSPLSAAAVSPSKLPEDDEPPARPPPPPPASVSPQAEPVWTPPAPAPAAPPSTPAAPKRRGSSGSVDETLFALPAASEPVIRSSAENMDLKEQPGNTISAGQEDFPSVLLETAASLPSLSPLSAASFKEHEYLGNLSTVLPTEGTLQENVSEASKEVSEKAKTLLIDRDLTEFSELEYSEMGSSFSVSPKAESAVIVANPREEIIVKNKDEEEKLVSNNILHNQQELPTALTKLVKEDEVVSSEKAKDSFNEKRVAVEAPMREEYADFKPFERVWEVKDSKEDSDMLAAGGKIESNLESKVDKKCFADSLEQTNHEKDSESSNDDTSFPSTPEGIKDRSGAYITCAPFNPAATESIATNIFPLLGDPTSENKTDEKKIEEKKAQIVTEKNTSTKTSNPFLVAAQDSETDYVTTDNLTKVTEEVVANMPEGLTPDLVQEACESELNEVTGTKIAYETKMDLVQTSEVMQESLYPAAQLCPSFEESEATPSPVLPDIVMEAPLNSAVPSAGASVIQPSSSPLEASSVNYESIKHEPENPPPYEEAMSVSLKKVSGIKEEIKEPENINAALQETEAPYISIACDLIKETKLSAEPAPDFSDYSEMAKVEQPVPDHSELVEDSSPDSEPVDLFSDDSIPDVPQKQDETVMLVKESLTETSFESMIEYENKEKLSALPPEGGKPYLESFKLSLDNTKDTLLPDEVSTLSKKEKIPLQMEELSTAVYSNDDLFISKEAQIRETETFSDSSPIEIIDEFPTLISSKTDSFSKLAREYTDLEVSHKSEIANAPDGAGSLPCTELPHDLSLKNIQPKVEEKISFSDDFSKNGSATSKVLLLPPDVSALATQAEIESIVKPKVLVKEAEKKLPSDTEKEDRSPSAIFSAELSKTSVVDLLYWRDIKKTGVVFGASLFLLLSLTVFSIVSVTAYIALALLSVTISFRIYKGVIQAIQKSDEGHPFRAYLESEVAISEELVQKYSNSALGHVNCTIKELRRLFLVDDLVDSLKFAVLMWVFTYVGALFNGLTLLILALISLFSVPVIYERHQAQIDHYLGLANKNVKDAMAKIQAKIPGLKRKAE

SEQ ID NO: 72 - protein, 373 aa, Homo sapiens
MEDLDQSPLVSSSDSPPRPQPAFKYQFVREPEDEEEEEEEEEEDEDEDLEELEVLERKPAAGLSAAPVPTAPAAGAPLMDFGNDFVPPAPRGPLPAAPPVAPERQPSWDPSPVSSTVPAPSPLSAAAVSPSKLPEDDEPPARPPPPPPASVSPQAEPVWTPPAPAPAAPPSTPAAPKRRGSSGSVVVDLLYWRDIKKTGVVFGASLFLLLSLTVFSIVSVTAYIALALLSVTISFRIYKGVIQAIQKSDEGHPFRAYLESEVAISEELVQKYSNSALGHVNCTIKELRRLFLVDDLVDSLKFAVLMWVFTYVGALFNGLTLLILALISLFSVPVIYERHQAQIDHYLGLANKNVKDAMAKIQAKIPGLKRKAE

SEQ ID NO: 73 - protein, 527 aa, Homo sapiens
MYALFLLASLLGAALAGPVLGLKECTRGSAVWCQNVKTASDCGAVKHCLQTVWNKPTVKSLPCDICKDVVTAAGDMLKDNATEEEILVYLEKTCDWLPKPNMSASCKEIVDSYLPVILDIIKGEMSRPGEVCSALNLCESLQKHLAELNHQKQLESNKIPELDMTEVVAPFMANIPLLLYPQDGPRSKPQPKDNGDVCQDCIQMVTDIQTAVRTNSTFVQALVEHVKEECDRLGPGMADICKNYISQYSEIAIQMMMHMQDQQPKEICALVGFCDEVKEMPMQTLVPAKVASKNVIPALELVEPIKKHEVPAKSDVYCEVCEFLVKEVTKLIDNNKTEKEILDAFDKMCSKLPKSLSEECQEVVDTYGSSILSILLEEVSPELVCSMLHLCSGTRLPALTVHVTQPKDGGFCEVCKKLVGYLDRNLEKNSTKQEILAALEKGCSFLPDPYQKQCDQFVAEYEPVLIEILVEVMDPSFVCLKIGACPSAHKPLLGTEKCIWGPSYWCQNTETAAQCNAVEHCKRHVWN

SEQ ID NO: 74 - protein, 1222 aa, Homo sapiens
MLVGQGAGPLGPAVVTAAVVLLLSGVGPAHGSRDLVVGCGGFVKSDVEINYSLIEIKLYTKHGTLKYQTDCAPNNGYFMIPLYDKGDFILKIEPPLGWSFEPTTVELHVDGVSDICTKGGDINFVFTGFSVNGKVLSKGQPLGPAGVQVSLRNTGTEAKIQSTVTQPGGKFAFFKVLPGDYEILATHPTWALKEASTTVSVTNSNANAASPLIVAGYNVSGSVRSDGEPMKGVKFLLFSSLVTKEDVLGCNVSPVPGFQPQDESLVYLCYTVSREDGSFSFYSLPSGGYTVIPFYRGERITFDVAPSRLDFTVEHDSLKIEPVFHVMGFSVTGRVLNGPEGDGVPEAVVTLNNQIKVKTKADGSFRLENITTGTYTIHAQKEHLYFETVTIKIAPNTPQLADIIATGFSVCGQISIIRFPDTVKQMNKYKVVLSSQDKDKSLVTVETDAHGSFCFKAKPGTYKVQVMVPEAETRAGLTLKPQTFPLTVTNRPMMDVAFVQFLASVSGKVSCLNTCGDLLVTLQSLSRQGEKRSLQLSGKVNAMTFTFDNVLPGKYKISIMHEDWCWKNKSLEVEVLEDDMSAVEFRQTGYMLRCSLSHAITLEFYQDGNGRENVGIYSLFKGVNRFCLSKPGVYKVTPRSCHRFEQAFYIYDTSSPSIFTLTAIRHHVLGTITTDKMMDVTVTIKSSIDSEPALVLGPLKSVQELRREQQLAEIEARRQEREKNGNEEGEERMTKPPVQEMVDELQGPFSYDFSYWARSGEKITVTPSSKELLFYPPSMEAVVSGESCPGKLIEIHGKAGLFLEGQIHPELEGVEIVISEKGASSPLITVFTDDKGAYSVGPLHSDLEYTVTSQKEGYVLTAVEGTIGDFKAYALAGVSFEIKAEDDQPLPGVLLSLSGGLFRSNLLTQDNGILTFSNLSPGQYYFKPMMKEFRFEPSSQMIEVQEGQNLKITITGYRTAYSCYGTVSSLNGEPEQGVAMEAVGQNDCSIYGEDTVTDEEGKFRLRGLLPGCVYHVQLKAEGNDHIERALPHHRVIEVGNNDIDDVNIIVFRQINQFDLSGNVITSSEYLPTLWVKLYKSENLDNPIQTVSLGQSLFFHFPPLLRDGENYVVLLDSTLPRSQYDYILPQVSFTAVGYHKHTTLIFNPTRKLPEQDIAQGSYIALPLTLLVLLAGYNHDKLIPLLLQLTSRLQGVRALGQAASDNSGPEDAKRQAKKQKTRRT

SEQ ID NO: 75 - DNA, 220 bp, Homo sapiens
  misc_feature 173, 200: n = A,T,C or G
ttaggcgcgctcctccgacccgctccgctccgctccgctcggccccgcgccgcccgtcaacatgatccgctgcggcctggcctgcgagcgctgccgctggatcctgcccctgctcctactcagcgccatcgccttcgacatcatcgcgctggccggccgcggctggttgcagnctaacgaccacggccagacgtcctcgntgtggtggaaatgctcccaa

SEQ ID NO: 76 - DNA, 456 bp, Homo sapiens
  misc_feature 32, 120, 242, 285, 313, 314, 316, 334, 352, 388, 395, 396,404, 406, 415, 416, 425, 433, 444, 453: n = A,T,C or G
tgcctctctctgccctcaccaacattctgagngcccagctcatcagccactggaaaggcaacatgaccaggcggccccgcctcctggttctgcccaagttctccctggagactgaagtcnacctcaggaagcccctatagaacctgggaatgaccgacatgttcagacagtttcaggctgacttcacgagtctttcagaccaagagcctctccacgtcgcgcaggcgctgcagaaagtgaanatcgaggtgaaccagagtggcgcggtggcctcctcatacacanctgtcatagaatcagcccccatgggccnngnggagataattatggacanacccttcctctttgtggngggggggggccccacaggaacagtgcttttttgggncaagggnnggaacccncnccctggggnnagagacctncatctgtnacaaaactggngatgcatcngga

SEQ ID NO: 77 - DNA, 514 bp, Homo sapiens
  misc_feature 72, 195, 198, 212, 229, 260, 261, 305, 319, 332, 338, 340,346, 353, 387, 405, 441, 446, 488, 503, 504: n = A,T,C or G
cctggagaccgagaaccggaggctggagagcaaaatccgggagcacttggagaagaagggaccccaggtcanagactggagccattacttcaagatcatcgaggacctgagggctcagatcttcgcaaatactgtggacaatgcccgcatcgttctgcagattgacaatgcccgtcttgctgctgatgactttanagncaagtatgagacanagctggccatgcgccantctgtggagaacgacatccatgggctccgcnnggtcattgatgacaccaatatcacacgactgcatctggagacanagatcgaggctctnaaggaggagctgntcttcntnaagaanaaccacnaagaggaagtaaaaggcctacaagcccacattgngcagctctgggttgaccncggaggtagatgcccccaaatctcaggacctcgccnagatnatgggagacatccgggccccatatgacgagctggctctgaanaacctagaggagctnnacaagtactg

SEQ ID NO: 78 - DNA, 403 bp, Homo sapiens
  misc_feature 231, 232, 234, 304, 317: n = A,T,C or G
cactccacagaaggatgttattatcaagtcagatgcaccggacactttgttattggagaaacatgcagattatatcgcatcctatggctcaaagaaagatgattatgaatactgtatgtctgagtatttgagaatgagtggcatctattggggtctgacagtaatggatctcatgggacaacttcatcgcatgaatagagaagagattctggcatttattaagtcttgccnncntgaatgtggtggaataagtgctagtatcggacatgatcctcatcttttatacactcttagcgctgtccanattcttaccctgnatgacagtattaatgttattgacgtaaataaagttgtggaatatgttaaaggtctacagaaagaagatggccttttgctggagata

SEQ ID NO: 79 - DNA, 337 bp, Homo sapiens
  misc_feature 147, 148, 149, 164, 172, 173, 180, 181, 229, 234, 240, 288: n = A,T,C or G
ccgaattcagcaatcagtttgaatccatccaccctcctagagacatgcctgccgcgggtagcttgggttcttcatcaagaaaccggcagaggttcaacttgaatcagtatttgcccaatttttatcccctcgatatgtctgaacctnnnacaaaaggcactggngagaatannacttgtnnagaaccccatgccccttacccgccagggtattaaagacactttgaggngcccnctgtcnagagcatgcccatgtctgtgtacccctccaccgcctcctgctctgacntgtaagcctgctgcgaaatggagtcccacgacgtgatgattgactatga

SEQ ID NO: 80 - DNA, 204 bp, Homo sapiens
  misc_feature 156: n = A,T,C or G
gtgattggaggtctccttgccttggctgctgtgttccaaatcatctccctggtaatttaccccgtgaagtacacccagaccttcacccttcatgccaaccgtgctgtcacttacatctataactgggcctacggctttgggtgggcagccacgatnatcctgatcggctgtgccttcttcttctgctgcctccccacctacgaa

SEQ ID NO: 81 - DNA, 505 bp, Homo sapiens
  misc_feature 144, 147, 257, 258, 307, 323, 378, 406, 415, 430, 432, 453,478, 483, 494: n = A,T,C or G
tgcactggtcaccaagaacctggtccctggggaatcagtttatggagagaagagagtctcgatttcggaaggagatgacaaaattgagtaccgagcctggaaccccttccgctccaagctagcagcagcaatcctgggtggggnggnccagatccacatcaaaccgggggctaaggttctctacctcggggctgcctcgggcaccacggtctcccatgtctctgacatcgttggtccggatggtctagtctatgcanncgagttctcccaccgctctggccgtgacctcattaacttggccaagaanaagaccaacatcattnctgtgatcgaggatgctcgacacccacacaaataccgcatgctcatctcaatggnggatgtgatctttgctgatgtggcccanccagaccanacccggattgttggncntgagtgccccaccttcctgcntaatggaggacactttgtgattttnttaangccaaactgcnttgactccaca

SEQ ID NO: 82 - DNA, 351 bp, Homo sapiens
  misc_feature 26, 55, 154, 288, 291, 342: n = A,T,C or G
ctggaaccccttccgctccaagctancagcagcaatcctgggtggtgtggaccanatccacatcaaaccgggggctaaggttctctacctcggggctgcctcgggcaccacggtctcccatgtctctgacatcgttggtcccgatggtctacanctatgcagtcgagttctcccaccgctctggccgtgacctcattaacttggccaagaagaggaccaacattttcctgtgatcgaggatgctcgacacccacacaaataccgcatgctcatcgcaatggtggatgnganctttgctgatgtggcccatccacaccaaacccggattgtttggctgaatgnccacacctt

SEQ ID NO: 83 - DNA, 143 bp, Homo sapiens
  misc_feature 32, 118, 126, 131, 133: n = A,T,C or G
gtggggtagagcagcggctgccatgctcttcnggggcttcatcatcctggagatctgtttcatcctctccttcttcgccctctgtggaccccacaagcttgtcttcctgagagtgaanggaggggnccttncnttggctgctg

SEQ ID NO: 84 - DNA, 365 bp, Homo sapiens
  misc_feature 49, 117, 130, 167, 174, 187, 196, 205, 213, 218, 228, 256,262, 272, 296, 298, 307, 328, 337, 356: n = A,T,C or G
gagagcatgaccgatggattccagttcgagtatggcggccagggctccnaccctgccgatgtggccatccagctgaccttcctgcgcctgatgtccaccgaggcctcccagaacatnacctaccactgcnagaacagcgtggcctacatggaccaccattactggcnacctcangaaggccctgctnctccagggntccaaccanatcgagangcgcnccgagggcgncagccgcttcacctacagcgtcactggngatggntgcaccaatnacaccggagcctggggcaacacantnattgtttangggaccaccaagacctcgggnctgcccatnattaatgtggcccccttgnacgttggtg

SEQ ID NO: 85 - DNA, 263 bp, Homo sapiens
  misc_feature 33, 34, 105, 126, 129, 135, 142, 143, 144, 147, 152, 157,183, 198, 202, 203, 208, 211, 224, 227, 235, 245, 246, 251: n = A,T,C or G
actatactgagttcaccacgcccgatggccatnnctacgacatcctggaactgccctaccacggggacaccctcagcatgttcattgctgccccttatgaaaaanaggtgcctctctctgccctcnccnacattntgagtgnnnggntcatnagccnctggaaaggcaacatgaccaggctgncccgcctcctggttntgcnnaaganctncctggtgactgangtngacctcangaagcccctnnagaanctgcgaatgacc

SEQ ID NO: 86 - DNA, 434 bp, Homo sapiens
  misc_feature 34, 153, 186, 198, 206, 211, 214, 216, 245, 247, 250, 252,263, 274, 275, 277, 286, 287, 291, 292, 306, 318, 326, 328,332, 340, 344, 346, 354, 358, 361, 378, 379, 406, 410: n = A,T,C or G
gacaagccggctacagggagtcggcgcgctcggncaggcagcctctgacaatagcggcccagaagatgcaaagagacaagccaagaaacagaagacaaggcggacgtgaggaggaaggggacagttgcagtctcacttgggacaggccacagncaggggtccggccactacccgcccgtgggatanaagccaaaagcntgcgtcanctaanttnancctgtgctgctgggcccgcaccccatgtncnttntnactgtggcatnctgcacccatnntnacccctccnnaaannccctcttgcaatgnaatgaatggagnctcctttntntctnttgaacanaggntnttttctgngggnaanataatttattattattnntgtcaaaaaagaatttaaggtgtgctnccgngtgagaaagtcattctttatcttc

SEQ ID NO: 87 - DNA, 300 bp, Homo sapiens
  misc_feature 32, 33, 34, 35, 139, 142, 146, 196, 256, 278, 287: n = A,T,C or G
gccgcatcggcatgagggtgtcttcatttgtnnnngaaaggaagatgcactggtcaccaagaacctggtccctggggaatcagtttatggagagaagagagtctcgatttcggaaggagatgacaaaattgagtaccgngcntggnaccccttccgctccaagctagcagcagcaatcctgggtggtgtggaccangatccacatcaaaccgggggctaaggtgtctctacctcggggctgcctcgggcaccacangactcccatgtctctgacatcnttggtcccnatggtctattcta

SEQ ID NO: 88 - DNA, 113 bp, Homo sapiens
  misc_feature 34, 75, 106: n = A,T,C or G
ggcttggtcattgtcctcggcagtggcgtttacntctactacaccaagcttcagggaaagacccttttcggcttntcgggctcccactcctacaggcccatgaccnaggagtc

SEQ ID NO: 89 - DNA, 173 bp, Homo sapiens
  misc_feature 103, 126, 157: n = A,T,C or G
aagaaacgtcttctaaatttccccatcttctatttccaatccaaatggcgtctggaagaccaatgtggcaaggaaaaacaggtcttcatcgaatctactaatnccacaccttttattgacacacanaatgttgagaatcccaaatttgattgatttntagaacatgtgagagg

SEQ ID NO: 90 - DNA, 218 bp, Homo sapiens
  misc_feature 26, 124, 131, 146, 154, 160, 161, 162, 165, 170, 187, 188: n = A,T,C or G
ctggaaccccttccgctccaagctancagcagcaatcctgggtggtgtggaccaaatccacatcaaaccgggggctaaggttctctacctcggggctgcctcgggcaccacggtctcccatgtntctgggntggctggtcccgatngagctacnactatnnngcnatttnttccaccgctctggccnngacctcattaacttggccaataagaggacc

SEQ ID NO: 91 - DNA, 231 bp, Homo sapiens
  misc_feature 11, 21, 64, 83, 86, 100, 125, 132, 148, 149, 205, 216, 226: n = A,T,C or G
ctggctctggncaggtgctangcactcctcacagcttgacctgggtttgcttccacaccctcanaagaggagagccggcacancanaggcaccggcgatnaagtggcacagccccagtcggaatncaccggnttctgaaagtgccttnntgtgagaaagaggaaggggccgcttggagagctgggctctcgcatgtgatgtttancccactgagantataccctcnggtga

SEQ ID NO: 92 - DNA, 127 bp, Homo sapiens
  misc_feature 26, 29, 36, 39, 43, 56, 59, 64, 69, 97, 100, 108, 109: n = A,T,C or G
gtgattggaggtctccttgccttggntgntgtgtancanatcntctccctggcaanttnccccntgaanaacacccatttcttttcctttcatgccncangtgctgtnncttacatctataactggg

SEQ ID NO: 93 - DNA, 167 bp, Homo sapiens
  misc_feature 79, 80, 82, 101, 124: n = A,T,C or G
gcccctgctcctactcagcgccatcgccttcgacatcatcgcgctggccggccgcggctggttgcagtctatcgaccanngncagacgtcctcgctgtggnggaaatgctcccaagagggcggnggcggcgggtcctacgaggagggctgtgggagactcatggagt

SEQ ID NO: 94 - DNA, 242 bp, Homo sapiens
  misc_feature 23, 26, 28, 40, 62, 64, 68, 78, 79, 80, 84, 87, 99, 102,103, 122, 124, 126, 128, 129, 136, 139, 141, 147, 150, 154,168, 178, 195, 197, 204, 223, 236: n = A,T,C or G
cgggggtctggcaggaatgggangcntncacaacgagaangagaccatgcaaagcctgaacnancggntggcctcttnnntggncanaatgaggagccnggnnaccgagaaccggaggctgnanancnnaatcccngancncttggngangaangggcccctgtgcanagactggagncatttcttttgatcatngnggacccnaggggtcagatcttctcanatactgtgggcantgcccg

SEQ ID NO: 95 - DNA, 190 bp, Homo sapiens
  misc_feature 65, 78, 79, 80, 165: n = A,T,C or G
tacagttatatgaacgaattaaagttcctgttgactggagtaaggttaataaacctccatacccnaaactgggagccnnnatgaaaaagctagaaaactgcaactatgctgttgaattagggaagcatcctgctaaattctccctggttggcattggagggcccnacctgaatgatgggaaccaaaccct

SEQ ID NO: 96 - DNA, 299 bp, Homo sapiens
  misc_feature 265, 278, 289: n = A,T,C or G
ctctgaagtccgcagtggctacaggattcaggccagccagcaggacgactccatgcgggtcctgtactacatggagaaggagctggccaacttcgacccttctcgacctggcccccccagtggccgtgtggagcgggccatgagtgaagtcacctccctccacgaggacgactggcgatctcggccttcccggggccctgccctcaccccgatccgggatgaggagtggggtggccactccccccggagtcccacgggatgggancaggagccctcanggagcacgcangcgggggctg

SEQ ID NO: 97 - DNA, 287 bp, Homo sapiens
  misc_feature 26, 221, 238, 280: n = A,T,C or G
ggttcccgagggctggctcatcttcntggccgagcaggaggagctctacgtccgcgtgcagaacgggttccggaaggtccagctggaggcccggacaccactcccacgagggacggacaatgaagtggccgccttgcagccccccgtggtgcagctgcacgacagcaacccctacccgcggcgggagcacccccaccccaccgcgcgggcctggggggcanatgacatcctggccagnccccctctcctgcccgagccccagccctaccccggagccccncaccaca

SEQ ID NO: 98 - DNA, 219 bp, Homo sapiens
  misc_feature 21: n = A,T,C or G
ctcccgccaggcgctttctcngacgccttgcccagcgggccgcccgaccccctgcaccatggaccccgctcgccccctggggctgtcgattctgctgcttttcctgacggaggctgcactgggcgatgctgctcaggagccaacaggaaataacgcggagatctgtctcctgcccctagactacggaccctgccgggccctacttctccgttactacta

SEQ ID NO: 99 - DNA, 437 bp, Homo sapiens
  misc_feature 252, 268, 278, 314, 348, 352, 368, 375, 376, 379, 394, 411,426: n = A,T,C or G
ctaatttggggtatcactgagctgaagacaaagagaagggggagaaaacctagcagaccaccatgtgctatgggaagtgtgcacgatgcatcggacattctctggtggggctcgccctcctgtgcatcgcggctaatattttgctttactttcccaatggggaaacaaagtatgcctccgaaaaccacctcagccgcttcgtgtggttcttttctggcatcgtaggaggtggcctgctgatgctcctgccancatttgtcttcattgngctggaacangatgactgctgtggctgctgtggccctgaaaactgnggcaaacgatgtgcgatgctttcttctgtattgnctgntctcattggaattgcncgatctnnctnctgtgtgattgtggnaggccttggcttatcanaaggaccactatgtnttgattccctc

SEQ ID NO: 100 - DNA, 295 bp, Homo sapiens
  misc_feature 76, 103, 169, 192, 200, 206, 209, 220, 237, 270, 271, 278: n = A,T,C or G
ggacatcacatatgaatgcacgatatgaagagcctggttacagtttcgactcctctctgcaagtgaataggcccanaaaggtgtaagagactctttgaatggncataaaattctgcttgttaagaacaagaattggctctggtaactgaccttcggagctaaaatatanaactatttgggaagtatgaaacnatgtctcntgatcnggngtacccttatncctgtgacgaaaggccnctgacaatactggtataattgtaaataatgtgnnactccgntttctatcaagtattaa

SEQ ID NO: 101 - DNA, 151 bp, Homo sapiens
  misc_feature 68, 82, 116, 124, 139: n = A,T,C or G
gcccctgctcctactcagcgccatcgccttcgacatcatcgcgctggccggccgcggctggttgcagnctatcgaccacggncagacgtcctctctgtggtggaaatgctcccaanagggcggnggcggcgggtcctangaggagggctgt

SEQ ID NO: 102 - DNA, 511 bp, Homo sapiens
  misc_feature 61, 275, 299, 303, 328, 344, 378, 379, 396, 416, 502: n = A,T,C or G
gccgcatcggcatgagggtgtcttcatttgtcgaggaaaggaagatgcactggtcaccaanaacctggtccctggggaatcagtttatggagagaagagagtctcgatttcggaaggagatgacaaaattgagtaccgagcctggaaccccttccgctccaagctagcagcagcaatcctgggtggtgtggaccagatccacatcaaaccgggggctaaggttctctacctcggggctgcctcgggcaccacggtctcccatgtctctgacatcnttggtccggatggtctagtctatncagncgagttctcccaccgctctggccgngacctcattaacttgnccaagaagaggaccaacatcattcctgtgatcgnngatgctcgacacccacncaaataccgcatgctcatcncaatggtggatgtgatctttgctgatgtggcccacccagaccaaacccggattgtggtccttgaatgccccacaccttcctgcgtnatggaggac

SEQ ID NO: 103 - DNA, 143 bp, Homo sapiens
ctcagtgcctaacatgggtgccaaataaatattcgtagaattacactgaattgtaaaaaccattcgtttttgtttacaattgccaaaaatctcaaaaggccctgtatttatgtaattctttgaaattattattttattttgat

SEQ ID NO: 104 - DNA, 198 bp, Homo sapiens
  misc_feature 11, 12, 37, 84, 89, 99, 101, 105, 145, 169: n = A,T,C or G
taatttggggnntcactgagctgaagacaaagagaanggggagaaaacctagcagaccaccatgtgctatgggaagtgtgcacnatgcnttggacattntntggnggggctcgcccttctgtgcattgcgggtaatattttgctntactttcccaatggggaaacaaantatgcctccgaaaaccacctcatccgctt

SEQ ID NO: 105 - DNA, 128 bp, Homo sapiens
  misc_feature 33, 102, 115: n = A,T,C or G
gccgggagccatgcgaccccagggccccgccgnctccccgcagcggctccgcggcctcctgctgctcctgctgctgcagctgcccgcgccgtcgagcgcctntgagatccccaangggaaacaaaagg

SEQ ID NO: 106 - DNA, 220 bp, Homo sapiens
  misc_feature 101, 102, 131, 153, 211, 216: n = A,T,C or G
attacacatgactgattattgggtgtgcctggcaagactaaatgctgattcttttcagcgtttgaattaaaagaattccatatacagcagatagataacannaacaaatattgaactaaaatcgctggcgncattatatatttaaggcgtccntcataaactcctcattattctctatgtgttctgttacagcttctatcatgcttcatcntgacnacct

SEQ ID NO: 107 - DNA, 199 bp, Homo sapiens
  misc_feature 134: n = A,T,C or G
aggaaaaagagcagttttcactcagttttggttccctgcccgaggtgctgacccaattcgctgccaaaagagtgtcaatcagaatatacaaatcccgtatggtgtgtgtcatcctctcttaatcatttttactnattctaataatcagctctagcttgcttcataattttcatggctttgcttgatctgttgatgcttt

SEQ ID NO: 108 - DNA, 493 bp, Homo sapiens
  misc_feature 230, 252, 322, 340, 395, 408, 411, 433, 442, 448, 458, 461,464, 476: n = A,T,C or G
ctaatttggggtatcactgagctgaagacaaagagaagggggagaaaacctagcagaccaccatgtgctatgggaagtgtgcacgatgcatcggacattctctggtggggctcgccctcctgtgcatcgcggctaatattttgctttactttcccaatggggaaacaaagtatgcctccgaaaaccacctcagccgcttcgtgtggttcttttctggcatcgtaggaggnggcctgctgatgctcctgccancatttgtcttcattgggctggaacaggatgactgctgtggctgctgtggccatgaaaactgtggcaaacnatgtgcgatgctttcttntgtattggctgctctcattggaattgcaggatctggctactgtgtcattgtggcngcccttggcttancanaacgaccactatgtcttgattncctctgccngggggntacacctttnccntcnccgagggccagnaccttctggatacctct

SEQ ID NO: 109 - DNA, 117 bp, Homo sapiens
  misc_feature 84: n = A,T,C or G
ccgtcccgcgcgctcctccgacccgctccgctccgctccgctcggccccgcgccgcccgtcaacatgatccgctgcggcctggnctgcgagcgctgccgctggatcctgcccctgct

SEQ ID NO: 110 - DNA, 122 bp, Homo sapiens
  misc_feature 32, 33, 104, 114: n = A,T,C or G
ggcgcccgcgctcgcaggccactctctgctgnngcccgtcccgcgcgctcctccgacccgctccgctccgctccgctcggccccgcgccgcccgtcaacatganccgctgcggnctggcctg

SEQ ID NO: 111 - DNA, 212 bp, Homo sapiens
  misc_feature 35, 64, 99, 100, 130, 180, 186, 190, 192, 200, 203: n = A,T,C or G
gcctgcttaaaaggtataattaaacttcttttctnttctacattgacacacagaaatgtgtcantgtaaagccaaaaccatcttctgtgtttatggccnntctattctcaaagttaaaagtaaaattgtntcagagagcacagttccctttatttcacataagcccccctgatagacagnaacggngttnanttttatanaanatttgtgct

SEQ ID NO: 112 - DNA, 187 bp, Homo sapiens
  misc_feature 30, 81, 84, 120, 134, 146, 155, 156, 157, 161, 183: n = A,T,C or G
ggaaatgctgcgaggagtgggtgtgtgacnagcccaaggaccaaaccgtggttgggcctgccctcgcggcttaccgactgnaanacacgtttggcccacacccaactatgattagagccnactgtctggtccanaccacaaagtgnagcgcctgnnncaanacctgtgggatgggcatctccncccg

SEQ ID NO: 113 - DNA, 144 bp, Homo sapiens
  misc_feature 47, 48, 50, 68, 69, 100, 110, 112, 113, 121, 125, 134: n = A,T,C or G
agaagaagaaactgtttctccaggcgactttgaacccattttttggnngngttcatattattaaactnntcaaaaatgctttaataatttgggagaaaanattttttaantnntgaaatanattngtgtttatnttttattatg

SEQ ID NO: 114 - DNA, 272 bp, Homo sapiens
  misc_feature 52, 79, 133, 183, 235, 247: n = A,T,C or G
ggccctctcagccctcctaatgacctccggcctagccatgtgatttcacttncactccataacgctcctcatactaggnctactaaccaacacactaaccatataccaatgatggcgcgatgtaacacgaganagcacataccaaggccaccacacaccacctgtccaaaaaggccttcgatncgggataatcctatttattacctcagaagtttttttcttctcaggatttttntgagccttttancactccaacctatcccctacccccc

SEQ ID NO: 115 - DNA, 236 bp, Homo sapiens
  misc_feature 173, 186, 189, 194, 207, 213: n = A,T,C or G
ggctgctgccgcgtctgcgccaagcagctgggcgagctgtgcaccgagcgcgacccctgcgacccgcacaagggcctcttctgtgacttcggctccccggccaaccgcaagatcggcgtgtgcaccgccaaagatggtgctccctgcatcttcggtggtacggtgtaccgcancggagagtccttncanagcanctgcaagtaccantgcacntgcctggacggggcggtgggctg

SEQ ID NO: 116 - DNA, 508 bp, Homo sapiens
  misc_feature 230, 320, 383, 423, 424, 452, 467, 493: n = A,T,C or G
gcctggagaccgagaaccggaggctggagagcaaaatccgggagcacttggagaagaagggaccccaggtcagagactggagccattacttcaagatcatcgaggacctgagggctcagatcttcgcaaatactgtggacaatgcccgcatcgttctgcagattgacaatgcccgtcttgctgctgatgactttagagtcaagtatgagacagagctggccatgcgccantctgtggagaacgacatccatgggctccgcaaggtcattgatgacaccaatatcacacgactgcagctggagacagagatcgaggctctnaaggaggagctgctcttcatgaagaagaaccacgaagaggaagtaaaaggcctacaagcccanattgccagctctgggttgaccgtggaggtagatgcccccnnatctcaggacctcgccaagatcatggcngacatccgggcccantatgacgagctggctcggaagaaccnagaggagctagacaa

SEQ ID NO: 117 - DNA, 516 bp, Homo sapiens
  misc_feature 80, 160, 196, 199, 209, 213, 262, 306, 320, 341, 354, 365,382, 405, 424, 441, 446, 451, 466, 467, 474, 483, 493, 503: n = A,T,C or G
gcctggagaccgagaaccggaggctggagagcaaaatccgggagcacttggagaagaagggaccccaggtcagagactgnagccattacttcaagatcatcgaggacctgagggctcagatcttcgcaaatactgtggacaatgcccgcatcgttctgcngattgacaatgcccgtcttgctgctgatgactttanagncaagtatganacanagctggccatgcgccactctgtggagaacgacatccatgggctccgcanggtcattgatgacaccaatatcacacgactgcatctggagacanagatcgaggctctnaaggaggagctgctcttcatnaagaaaaaccacnaagaggaagtnaaaggcctaccagcccncattgccagctctgggttgaccntggaggtagatgccccccnatctcaggacctcgccnagatnatggnagacatccgggcccnntatgacnagctggctntgaaaaaccnagaggagctngacaagtactggt

SEQ ID NO: 118 - DNA, 316 bp, Homo sapiens
  misc_feature 102, 142, 274, 313: n = A,T,C or G
agctcatcagccactggaaaggcaacatgaccaggctgccccgcctcctggttctgcccaagttctccctggagactgaagtcgacctcaggaagcccctanagaacctgggaatgaccgacatgttcagacagtttcaggntgacttcacgagtctttcagaccaagagcctctccacgtcgcgcaggcgctgcagaaagtgaagatcgaggtgaacgagagtggcacggtggcctcctcatccacagctgtcatagtctcagcccgcatggnccccgaggagatcatcatggacagacccttcctctttgnggg

SEQ ID NO: 119 - DNA, 462 bp, Homo sapiens
  misc_feature 32, 34, 356: n = A,T,C or G
tttcttgcaaagaccgtattttgattccaagngnaataagaacatttactcagacataccaccccaggtgcctgtccggcctatttcctacaccccgagtattccaagtgactcaagaaacaatctggaccgaaattccttcgaaggatctgctatcccagagcatcccgaattcagcacttttaaccccgagtctgtgcacgggcaccgaaaagcagtggcggtctgcagcgtggcgccaaacctgcctcccccacccccttcaaactccccttctgacagcgactccatccagaagcctagctgggactttgactatgacacaaaagtgggggatcttgatccctgtctttccnagaagcctctagaggaaaagccttcccagccatacagtgcccgggaaagcctgtctgaagtgcagtctctgagctccttccattccgaatcgtgcgatgacaatgg

SEQ ID NO: 120 - DNA, 230 bp, Homo sapiens
  misc_feature 34, 181, 195, 197, 204: n = A,T,C or G
ggaagagttgttgggggttttttgcatccatagnactggttactttgaacaaataaataaaagctttctgtagttgcttcctttatcagaaaagaacatttgataccatggtatatcatttcctcttcattaaagaacagcttttctaaatgttgggggaaatgtccatagtcattactcnctcaaaacttgtgngntcatgancctaaggaccattctagatttattac

SEQ ID NO: 121 - DNA, 334 bp, Homo sapiens
  misc_feature 203, 216, 311: n = A,T,C or G
ggaagataaggttaaaagttgttaatgaccaaacattctaaaagaaatgcaaaaaaaaagtttattttcaagccttcgaactatttaaggaaagcaaaatcatttcctaaatgcatatcatttgtgagaatttctcattaatatcctgaatcattcatttcagctaaggcttcatgttgactcgatatgtcatctaggaaagnactatttcatggnccaaacctgttgccatagttggtaaggctttcctttaagtgtgaaatatttagatgaaattttctcttttaaagttctttatagggttagggggngggaaaatgctatattaataaat

SEQ ID NO: 122 - DNA, 125 bp, Homo sapiens
  misc_feature 7, 13, 38, 40, 43, 60, 62, 68, 74, 85, 100, 107: n = A,T,C or G
gcttccnaagaanaaactggttctgccggggaatttgnanccnttttttgggcggggtcntnttattnaacttncccaaaatggntaaataatttggggnaaaatantttttaaggggtggtatt

SEQ ID NO: 123 - DNA, 71 bp, Homo sapiens
  misc_feature 20, 22, 23, 35, 56, 63, 67, 71: n = A,T,C or G
tcgtaggagggggcctgctnannctcctgccagcntttgacttctttgggttggancaggatnactnctgn

SEQ ID NO: 124 - DNA, 499 bp, Homo sapiens
  misc_feature 119, 253, 318, 442, 482, 483: n = A,T,C or G
ctcttcactaccctgattcttgattcctggctctaccctgtctgtcccttttctttgaccagatctttctcttccctgaacgttttcttctttccctggacaggcagcctcctttgtgngtattcagaggcagtgatgacttgctgtccaggcagctccctcctgcacacagaatgctcagggtcactgaaccactgcttctcttttgaaagtagagctagctgccactttcacgtggcctccgcagtgtctncacctacacccctgtgctcccctgccacactgatggctcaagacaaggctggcaaaccctcccanaaacatctctggcccagaaagcctctctctccctccctctctcatgaggcacagccaagccaagcgctcatgttgagccaatgggccagccacagagcaaaagagggtttattttcagtccccnctctctgggtcagaaccagagggcatgctgaatgcccccnncttacttggtgagggg

SEQ ID NO: 125 - DNA, 267 bp, Homo sapiens
  misc_feature 38, 150, 212, 226, 234, 255, 259, 261: n = A,T,C or G
aagaaataaagggttatccaggcgtccaggcccctgangacctggagtgggagcgctataggggcagaggaagtgaagaatacagggctccaagacctcagagtgaggagagttgggatgaggaggacaagagaaactaccccagcttanagcttgataagatggcacatggatatggtgaagaaagtgaggaagagaggggccttgagccnggaaagggacgccntcacatangcaggggaggggagccacctncctntntcatgt

SEQ ID NO: 126 - DNA, 69 bp, Homo sapiens
  misc_feature 1, 34, 36: n = A,T,C or G
naagggtctgctgtgcaccatcccccatcctacntngcccacctggcctcagacttcggggtgagggtg

SEQ ID NO: 127 - DNA, 406 bp, Homo sapiens
  misc_feature 80, 118, 211, 221, 322, 329, 342, 375: n = A,T,C or G
ctttcatctaatttggggtatcactgagctgaagacaaagagaagggggagaaaacctagcagaccaccatgtgctatgngaagtgtgcacgatgcatcggacattctctggtggggntcgccctcctgtgcatcgcggctaatattttgctttactttcccaatggggaaacaaagtatgcctccgaaaaccacctcagccgcttcgtgnggttcttttntggcatcgtaagaggtggcctgctgatgctcctgccagcatttgtcttcattgggctggaacaggatgactgctgtggctgctgtggccatgaaaactgtngcaaacnatgtgcgatgctntcttctgtattggctgctctcattggaattgcnggatctggctactgtgtcattgtggcagccc

SEQ ID NO: 128 - DNA, 172 bp, Homo sapiens
  misc_feature 34, 35, 36, 88, 94, 97, 150: n = A,T,C or G
ggaaaatagataaagtgaaagaagaataaatacnnntttttaataatgtaattttaaaaatcctttataatcaggactgagtcttggnttgcanaanctgtcacttaccctgaaacacagtatcaaaagggaaacttaaaacatactgtntgatttttttatttcctcttac

SEQ ID NO: 129 - DNA, 287 bp, Homo sapiens
  misc_feature 107, 154, 182, 195, 208, 214, 228, 230, 231, 254, 255, 286: n = A,T,C or G
ttgtggagtgtggaggagaaagggtggaatcgggggtgatcaaaaaccttaagaagacacccaactttccaagttctgttctcttcatgaaagagttcttgcccaangaggaattgtacatgcccccactggtgatcaaggtcatcgaccacangcagtttgggcggaagcctgtcgtcggncagtgcaccatcnagcgcctggaccnctttcnctgtgacccttatncnnggaaagaggacatcttcccacanntcaaagcctcccttctgtctgccccaccatnc

SEQ ID NO: 130 - DNA, 1088 bp, Homo sapiens
gtcccgcgcgctcctccgacccgctccgctccgctccgctcggccccgcgccgcccgtcaacatgatccgctgcggcctggcctgcgagcgctgccgctggatcctgcccctgctcctactcagcgccatcgccttcgacatcatcgcgctggccggccgcggctggttgcagtctagcgaccacggccagacgtcctcgctgtggtggaaatgctcccaagagggcggcggcagcgggtcctacgaggagggctgtcagagcctcatggagtacgcgtggggtagagcagcggctgccatgctcttctgtggcttcatcatcctggtgatctgtttcatcctctccttcttcgccctctgtggaccccagatgcttgtcttcctgagagtgattggaggtctccttgccttggctgctgtgttccagatcatctccctggtaatttaccccgtgaagtacacccagaccttcacccttcatgccaaccctgctgtcacttacatctataactgggcctacggctttgggtgggcagccacgattatcctgattggctgtgccttcttcttctgctgcctccccaactacgaagatgaccttctgggcaatgccaagcccaggtacttctacacatctgcctaacttgggaatgaatgtgggagaaaatcgctgctgctgagatggactccagaagaagaaactgtttctccaggcgactttgaacccattttttggcagtgttcatattattaaactagtcaaaaatgctaaaataatttgggagaaaatattttttaagtagtgttatagtttcatgtttatcttttattatgttttgtgaagttgtgtcttttcactaattacctatactatgccaatatttccttatatctatccataacatttatactacatttgtaagagaatatgcacgtgaaacttaacactttataaggtaaaaatgaggtttccaagatttaataatctgatcaagttcttgttatttccaaatagaatggactcggtctgttaagggctaaggagaagaggaagataaggttaaaagttgttaatgaccaaacattc

SEQ ID NO: 131 - DNA, 2870 bp, Homo sapiens
ctgcagctcagcagccgccgccagagcaggacgaaccgccaatcgcaaggcacctctgagaacttcaggatgcagatgtctccagccctcacctgcctagtcctgggcctggcccttgtctttggtgaagggtctgctgtgcaccatcccccatcctacgtggcccacctggcctcagacttcggggtgagggtgtttcagcaggtggcgcaggcctccaaggaccgcaacgtggttttctcaccctatggggtggcctcggtgttggccatgctccagctgacaacaggaggagaaacccagcagcagattcaagcagctatgggattcaagattgatgacaagggcatggcccccgccctccggcatctgtacaaggagctcatggggccatggaacaaggatgagatcagcaccacagacgcgatcttcgtccagcgggatctgaagctggtccagggcttcatgccccacttcttcaggctgttccggagcacggtcaagcaagtggacttttcagaggtggagagagccagattcatcatcaatgactgggtgaagacacacacaaaaggtatgatcagcaacttgcttgggaaaggagccgtggaccagctgacacggctggtgctggtgaatgccctctacttcaacggccagtggaagactcccttccccgactccagcacccaccgccgcctcttccacaaatcagacggcagcactgtctctgtgcccatgatggctcagaccaacaagttcaactatactgagttcaccacgcccgatggccattactacgacatcctggaactgccctaccacggggacaccctcagcatgttcattgctgccccttatgaaaaagaggtgcctctctctgccctcaccaacattctgagtgcccagctcatcagccactggaaaggcaacatgaccaggctgccccgcctcctggttctgcccaagttctccctggagactgaagtcgacctcaggaagcccctagagaacctgggaatgaccgacatgttcagacagtttcaggctgacttcacgagtctttcagaccaagagcctctccacgtcgcgcaggcgctgcagaaagtgaagatcgaggtgaacgagagtggcacggtggcctcctcatccacagctgtcatagtctcagcccgcatggcccccgaggagatcatcatggacagacccttcctctttgtggtccggcacaaccccacaggaacagtccttttcatgggccaagtgatggaaccctgaccctggggaaagacgccttcatctgggacaaaactggagatgcatcgggaaagaagaaactccgaagaaaagaattttagtgttaatgactctttctgaaggaagagaagacatttgccttttgttaaaagatggtaaaccagatctgtctccaagaccttggcctctccttggaggacctttaggtcaaactccctagtctccacctgagaccctgggagagaagtttgaagcacaactcccttaaggtctccaaaccagacggtgacgcctgcgggaccatctggggcacctgcttccacccgtctctctgcccactcgggtctgcagacctggttcccactgaggccctttgcaggatggaactacggggcttacaggagcttttgtgtgcctggtagaaactatttctgttccagtcacattgccatcactcttgtactgcctgccaccgcggaggaggctggtgacaggccaaaggccagtggaagaaacaccctttcatctcagagtccactgtggcactggccacccctccccagtacaggggtgctgcaggtggcagagtgaatgtcccccatcatgtggcccaactctcctggcctggccatctccctccccagaaacagtgtgcatgggttattttggagtgtaggtgacttgtttactcattgaagcagatttctgcttccttttatttttataggaatagaggaagaaatgtcagatgcgtgcccagctcttcaccccccaatctcttggtggggaggggtgtacctaaatatttatcatatccttgcccttgagtgcttgttagagagaaagagaactactaaggaaaataatattatttaaactcgctcctagtgtttctttgtggtctgtgtcaccgtatctcaggaagtccagccacttgactggcacacacccctccggacatccagcgtgacggagcccacactgccaccttgtggccgcctgagaccctcgcgccccccgcgccccccgcgcccctctttttccccttgatggaaattgaccatacaatttcatcctccttcaggggatcaaaaggacggagtggggggacagagactcagatgaggacagagtggtttccaatgtgttcaatagatttaggagcagaaatgcaaggggctgcatgacctaccaggacagaactttccccaattacagggtgactcacagccgcattggtgactcacttcaatgtgtcatttccggctgctgtgtgtgagcagtggacacgtgaggggggggtgggtgagagagacaggcagctcggattcaactaccttagataatatttctgaaaacctaccagccagagggtagggcacaaagatggatgtaatgcactttgggaggccaaggcgggaggattgcttgagcccaggagttcaagaccagcctgggcaacataccaagacccccgtctctttaaaaatatatatattttaaatatacttaaatatatatttctaatatctttaaatatatatatatattttaaagaccaatttatgggagaattgcacacagatgtgaaatgaatgtaatctaatagaagc

SEQ ID NO: 132 - DNA, 1408 bp, Homo sapiens
gtcgtccgcaaagcctgagtcctgtcctttctctctccccggacagcatgagcttcaccactcgctccaccttctccaccaactaccggtccctgggctctgtccaggcgcccagctacggcgcccggccggtcagcagcgcggccagcgtctatgcaggcgctgggggctctggttcccggatctccgtgtcccgctccaccagcttcaggggcggcatggggtccgggggcctggccaccgggatagccgggggtctggcaggaatgggaggcatccagaacgagaaggagaccatgcaaagcctgaacgaccgcctggcctcttacctggacagagtgaggagcctggagaccgagaaccggaggctggagagcaaaatccgggagcacttggagaagaagggaccccaggtcagagactggagccattacttcaagatcatcgaggacctgagggctcagatcttcgcaaatactgtggacaatgcccgcatcgttctgcagattgacaatgcccgtcttgctgctgatgactttagagtcaagtatgagacagagctggccatgcgccagtctgtggagaacgacatccatgggctccgcaaggtcattgatgacaccaatatcacacgactgcagctggagacagagatcgaggctctcaaggaggagctgctcttcatgaagaagaaccacgaagaggaagtaaaaggcctacaagcccagattgccagctctgggttgaccgtggaggtagatgcccccaaatctcaggacctcgccaagatcatggcagacatccgggcccaatatgacgagctggctcggaagaaccgagaggagctagacaagtactggtctcagcagattgaggagagcaccacagtggtcaccacacagtctgctgaggttggagctgctgagacgacgctcacagagctgagacgtacagtccagtccttggagatcgacctggactccatgagaaatctgaaggccagcttggagaacagcctgagggaggtggaggcccgctacgccctacagatggagcagctcaacgggatcctgctgcaccttgagtcagagctggcacagacccgggcagagggacagcgccaggcccaggagtatgaggccctgctgaacatcaaggtcaagctggaggctgagatcgccacctaccgccgcctgctggaagatggcgaggactttaatcttggtgatgccttggacagcagcaactccatgcaaaccatccaaaagaccaccacccgccggatagtggatggcaaagtggtgtctgagaccaatgacaccaaagttctgaggcattaagccagcagaagcagggtaccctttggggagcaggaggccaataaaaagttcagagttcattggatgtc

SEQ ID NO: 133 - DNA, 1154 bp, Homo sapiens
gggcactccacagaaggatgttattatcaagtcagatgcaccggacactttgttattggagaaacatgcagattatatcgcatcctatggctcaaagaaagatgattatgaatactgtatgtctgagtatttgagaatgagtggcatctattggggtctgacagtaatggatctcatgggacaacttcatcgcatgaatagagaagagattctggcatttattaagtcttgccaacatgaatgtggtggaataagtgctagtatcggacatgatcctcatcttttatacactcttagtgctgtccagattcttacgctgtatgacagtattaatgttattgacgtaaataaagttgtggaatatgttaaaggtctacagaaagaagatggttcttttgctggagatatttggggagaaattgacacaagattctctttttgtgcggtggcaactttggctttgttgggaagcttgatgctattaatgtggaaaaggcaatcgaatttgttttatcctgtatgaactttgacggtggatttggttgcagaccaggttctgaatcccatgctgggcagatctattgttgcacaggatttctggcaattacaagtcagttgcatcaagtaaattctgatttacttggctggtggctttgtgaacgacaattaccctcaggcgggctcaatggaaggccggagaagttaccagatgtatgctactcatggtgggtcctggcttccctaaagataattggaagacttcattggattgatagagagaaactgcgtaatttcattttagcatgtcaagatgaagaaacggggggatttgcagacaggccaggagatatggtggatccttttcataccttatttggaattgctggattgtcacttttgggagaagaacagattaaacctgttaatcctgtcttttgcatgcctgaagaagtgcttcagagagtgaatgttcagcctgagctagtgagctagattcattgaattgaaagttgcatagtatagttttgccattttaacatttctgtatttgaagtgcttatcgaatctaaaagtgactactgttaatattttgtatattgtgttaaattaattttaataaattatataattatacatattgtaaaataaagacc

SEQ ID NO: 134 - DNA, 14756 bp, Homo sapiens
ctgggcggccgggcgcggggagagggcgcgggagcggctcgtgcggcaggtaccatgcggacgcgcgagcccggcgaggccccggcaggcccgtccctgctcgggggcgcgctgagacggcgggtgagctccacgagagcgccgtcgccacttcgggccaactttgcgattcccgacagttaagcaatggggagacatttggctttgctcctgcttctgctccttctcttccaacattttggagacagtgatggcagccaacgacttgaacagactcctctgcagtttacacacctcgagtacaacgtcaccgtgcaggagaactctgcagctaagacttatgtggggcatcctgtcaagatgggtgtttacattacacatccagcgtgggaagtaaggtacaaaattgtttccggagacagtgaaaacctgttcaaagctgaagagtacattctcggagacttttgctttctaagaataaggaccaaaggaggaaatacagctattcttaatagagaagtgaaggatcactacacattgatagtgaaagcacttgaaaaaaatactaatgtggaggcgcgaacaaaggtcagggtgcaggtgctggatacaaatgacttgagaccgttattctcacccacctcatacagcgtttctttacctgaaaacacagctataaggaccagtatcgcaagagtcagcgccacggatgcagacataggaaccaacggggaattttactacagttttaaagatcgaacagatatgtttgctattcacccaaccagtggtgtgatagtgttaactggtagacttgattacctagagaccaagctctatgagatggaaatcctcgctgcggaccgtggcatgaagttgtatgggagcagtggcatcagcagcatggccaagctaacggtgcacatcgaacaggccaatgaatgtgctccggtgataacagcagtgacattgtcaccatcagaactggacagggacccagcatatgcaattgtgacagtggatgactgcgatcagggtgccaatggtgacatagcatctttaagcatcgtggcaggtgaccttctccagcagtttagaacagtgaggtcctttccagggagtaaggagtataaagtcaaagccatcggtgacattgattgggacagtcatcctttcggctacaatctcacactacaggctaaagataaaggaactccgccccagttctcttctgttaaagtcattcacgtgacttctccacagttcaaagccgggccagtcaagtttgaaaaggatgtttacagagcagaaataagtgaatttgctcctcccaacacacctgtggtcatggtaaaggccattcctgcttattcccatttgaggtatgtttttaaaaggacacctggaaaagctaaattcagtttaaattacaacactggtctcatttctattttagaaccagttaaaagacagcaggcagcccattttgaacttgaagtaacaacaagtgacagaaaagcgtccaccaaggtcttggtgaaagtcttaggtgcaaatagcaatccccctgaatttacccagacagcgtacaaagctgcttttgatgagaacgtgcccattggtactactatcatgagcctgagtgccgtagaccctgatgagggtgagaatgggtacgtgacatacagtatcgcaaatttaaatcatgtgccgtttgcgattgaccatttcactggtgccgtgagtacgtcagaaaacctggactacgaactgatgcctcgggtttatactctgaggattcgtgcatcagactggggcttgccgtaccgccgggaagtcgaagtccttgctacaattactctcaataacttgaatgacaacacacctttgtttgagaaaataaattgtgaagggacaattcccagagatctaggcgtgggagagcaaataaccactgtttctgctattgatgcagatgaacttcagttggtacagtatcagattgaagctggaaatgaactggatttgtttagtttaaaccccaactcgggggtattgtcattaaagcgatcgctaatggatggcttaggtgcaaaggtgtctttccacagtctgagaatcacagctacagatggagaaaattttgccacaccattatatatcaacataacagtggctgccagtcacaagctggtaaacttgcagtgtgaagagactggtgttgccaaaatgctggcagagaagctcctgcaggcaaataaattacacaaccagggagaggtggaggatattttcttcgattctcactctgtcaatgctcacataccgcagtttagaagcactcttccgactggtattcaggtaaaggaaaaccagcctgtgggttccagtgtaattttcatgaactccactgaccttgacactggcttcaatggaaaactggtctatgctgtttctggaggaaatgaggatagttgcttcatgattgatatggaaacaggaatgctgaaaattttatctcctcttgaccgtgaaacaacagacaaatacaccctgaatattaccgtctatgaccttgggataccccagaaggctgcgtggcgtcttctacatgtcgtggttgtcgatgccaatgataatccacccgagtttttacaggagagctattttgtggaagtgagtgaagacaaggaggtacatagtgaaatcatccaggttgaagccacagataaagacctggggcccaacggacacgtgacgtactcaattcttacagacacagacacattttcaattgacagcgtgacgggtgttgttaacatcgcacgccctctggatcgagagctgcagcatgagcactccttaaagattgaggccagggaccaagccagagaagagcctcagctgttctccactgtcgttgtgaaagtatcactagaagatgttaatgacaacccacctacatttattccacctaattatcgtgtgaaagtccgagaggatcttccagaaggaaccgtcatcatgtggttagaagcccacgatcctgatttaggtcagtctggtcaggtgagatacagccttctggaccacggagaaggaaacttcgatgtggataaactcagtggagcagttaggatcgtccagcagttggactttgagaagaagcaagtgtataatctcactgtgagggccaaagacaagggaaagccagtttctctgtcttctacttgctatgttgaagttgaggtggttgatgtgaatgagaacctgcacccacccgtgttttccagctttgtggaaaaggggacagtgaaagaagatgcacctgttggttcattggtaatgacggtgtcggctcatgatgaggacgccggaagagatggggagatccgatactccattagagatggctctggcgttggtgttttcaaaataggtgaagagacaggtgtcatagagacgtcagatcgactggaccgtgaatcgacctcccattattggctaacagtctttgcaaccgatcagggtgtcgtgcctctttcatcgttcatagagatctacatagaggttgaggatgtcaatgacaatgcaccacagacatcagagcctgtttattacccagaaatcatggaaaattctcctaaagatgtatctgtggtccagatcgaggcatttgatccagattcgagctctaatgacaagctcatgtacaaaattacaagtggaaatccacaaggattcttttcaatacatcctaaaacaggtctcatcacaactacgtcaaggaagctagaccgagaacagcaagatgaacacatattagaggttactgtgacagacaatggtagtccccccaaatcaaccattgcaagagtcattgtgaaaatccttgatgaaaatgacaacaaacctcagtttctgcaaaagttctacaaaatcagactccctgagcgggaaaagccagaccgagaaagaaatgccagacgggagccgctctatcgcgtcatagccaccgacaaggatgagggccccaatgcagaaatctcctacagcatcgaagacgggaatgagcatggcaaatttttcatcgaaccgaaaactggagtggtttcgtccaagaggttttcagcagctggagaatatgatattctttcaattaaggcagttgacaatggtcgccctcaaaagtcatcaaccaccagactccatattgaatggatctccaagcccaaacagtccctggagcccatttcatttgaagaatcattttttacctttactgtgatggaaagtgaccccgttgctcacatgattggagtaatatctgtggagcctcctggcatacccctttggtttgacatcactggtggcaactacgacagtcacttcgatgtggacaagggaactggaaccatcattgttgccaaacctcttgatgcagaacagaagtcaaactacaacctcacagtcgaggctacagatggaaccaccactatcctcactcaggtattcatcaaagtaatagacacaaatgaccatcgtcctcagttttctacatcaaagtatgaagttgttattcctgaagatacagcgccagaaacagaaattttgcaaatcagtgctgtggatcaggatgagaaaaacaaactaatctacactctgcagagcagtagagatccactgagtctcaagaaatttcgtcttgatcctgcaaccggctctctctatacttctgagaaactggatcatgaagctgtttcaccagcacacctcacggtcatggtacgagatcaagatgtgcctgtaaaacgcaactttgcaaggattgtggtcaatgtcagcgacacgaatgaccacgccccgtggttcaccgcttcctcctacaaagggcgggtttatgaatcggcagccgttggctcagttgtgttgcaggtgacggctctggacaaggacaaagggaaaaatgctgaagtgctgtactcgatcgagtcaggaaatattggaaatattggaaattcttttatgattgatcctgtcttgggctctattaaaactgccaaagaattagatcgaagtaaccaagcggagtatgatttaatggtaaaagctacagataagggcagtccaccaatgagtgaaataacttctgtgcgtatctttgtcacaattgctgacaacgcctctccgaagtttacatcaaaagaatattctgttgaacttagtgaaactgtcagcattgggagtttcgttgggatggttacagcccatagtcaatcatcagtggtgtatgaaataaaagatggaaatacaggtgatgcttttgatattaatccacattctggaactatcatcactcagaaagccctggactttgaaactttgcccatttacacattgataatacaaggaactaacatggctggtttgtccactaatacaacggttctagttcacttgcaggatgagaatgacaacgcgccagtttttatgcaggcagaatatacaggactcattagtgaatcagcctcaattaacagcgtggtcctaacagacaggaatgtcccactggtgattcgagcagctgatgctgataaagactcaaatgctttgcttgtatatcacattgttgaaccatctgtacacacatattttgctattgattctagcactggtgctattcatacagtactaagtctggactatgaagaaacaagtatttttcactttaccgtccaagtgcatgacatgggaaccccacgtttatttgctgagtatgcagcgaatgtaacagtacatgtaattgacattaatgactgcccccctgtgtttgccaagccattatatgaagcatctcttttgttaccaacatacaaaggagtaaaagtcatcacagtaaatgctacagatgctgattcaagtgcattctcacagttgatttactccatcaccgaaggcaacatcggggagaagttttctatggactacaagactggtgctctcactgtccaaaacacaactcagttaagaagccgctacgagctaaccgttagagcttccgatggcagatttgccggccttacctctgtcaaaattaatgtgaaagaaagcaaagaaagtcacctaaagtttacccaggatgtctactctgcggtagtgaaagagaattccaccgaggccgaaacattagctgtcattactgctattgggagtccaatcaatgagcctttgttttatcacatcctcaacccagatcgcagatttaaaataagccgcacttcaggggttctgtcaaccactggcacgcccttcgatcgtgagcagcaggaggcgtttgatgtggttgtagaagtgatagaggaacataagccttctgcagtggcccacgttgtcgtgaaggtcattgtagaagaccaaaatgataatgcgccggtgtttgtcaaccttccctactacgccgttgttaaagtggacactgaggtgggccatgtcattcgctatgtcactgctgtagacagagacagtggcagaaacggggaagtgcattactacctcaaggaacatcatgaacactttcaaattggacccttgggtgaaatttcactgaaaaagcaatttgagcttgacaccttaaataaagaatatcttgttacagtggttgcaaaagatggagggaacccggccttttcagcggaagttatcgttccgatcactgtcatgaataaagccatgcctgtgtttgaaaaacctttctacagtgcagagattgcagagagcatccaggtgcacagccctgtggtccacgtgcaggctaacagcccggaaggcctgaaagtgttctacagcatcacagacggagaccctttcagccagttcactattaacttcaatactggagttatcaatgtcatagctcctctggactttgaggcccacccggcatataagctgagcatacgcgcaactgactccttgacgggcgctcatgctgaagtatttgtggacatcatagtagacgacatcaatgataaccctcctgtgtttgctcagcagtcttatgcggtgaccctgtctgaggcatctgtaattggaacgtctgttgttcaagttagagccaccgattctgattcagaaccaaatagaggaatctcataccagatgtttgggaatcacagcaagagtcatgatcattttcatgtagacagcagcactggcctcatctcactactcagaaccctggattacgagcagtcccggcagcacacgatttttgtgagggcagttgatggtggtatgcccacgctgagcagtgatgtgattgtcacggtggacgttaccgacctcaatggtaatccaccactctttgaacaacagatttatgaagccagaattagcgagcacgcccctcatgggcatttcgtgacctgtgtaaaagcctatgatgcagacagttcagacatagacaagttgcagtattccattctgtctggcaatgatcataaacattttgtcattgacagtgcaacagggattatcaccctctcaaacctgcaccggcacgccctgaagccattttacagtcttaacctgtcagtgtctgatggagtttttagaagttccacccaggttcatgtaactgtaattggaggcaatttgcacagtcctgctttccttcagaacgaatatgaagtggaactagctgaaaacgctcccctacataccctggtgatggaggtgaaaactacggatggggattctggtatttatggtcacgttacttaccatattgtaaatgactttgccaaagacagattttacataaatgagagaggacagatatttactttggaaaaacttgatcgagaaaccccggcggagaaagtgatctcagtccgtttaatggctaaggatgctggaggaaaagttgctttctgcaccgtgaatgtcatccttacagatgacaatgacaatgcaccacaatttcgagcaaccaaatacgaagtgaatatcgggtccagtgctgctaaagggacttcagtcgtaaagtctgcaagtgatgccgatgagggctccaatgccgacatcacctatgccattgaagcagactctgaaagtgtaaaagagaatttggaaattaacaaactgtccggcgtaatcactacaaaggagagcctcattggcttggaaaatgaattcttcactttctttgttagagctgtggataatgggtctccatcaaaagaatctgttgttcttgtctatgttaaaatccttccaccggaaatgcagcttccaaaattttcagaacctttctatacctttacagtgtcagaggacgtgcctgttggaacagagatagatctcatccgagcagaacatagtgggactgttctttacagcctggtcaaagggaatactccagaaagcaatagggatgagtcctttgtgattgacagacagagcgggagactgaagttggagaagagtcttgatcatgagacaactaagtggtatcagttttccatactggccaggtgcactcaagatgaccatgagatggtggcttctgtagatgttagtatccaagtgaaagatgcaaatgacaacagcccggtctttgaatctagtccatatgaggcattcattgttgaaaacctgccagggggaagtagagtaattcagatcagggcatctgatgctgactcaggaaccaacggccaagttatgtatagcctggatcagtcacaaagtgtggaagtcattgaatcctttgccattaacatggaaacaggctggattacaactttaaaggaacttgaccatgaaaagagagacaattaccagattaaagtggttgcatcagatcatggtgaaaagatccagctatcctccacagccattgtggatgttaccgtcaccgatgtcaacgatagtccaccacgattcacggccgagatctataaagggactgtgagtgaggatgacccccaaggtggggtgattgccatcttaagtaccacggatgctgattctgaagagatcaacagacaagttacatatttcataacaggaggggatcctttaggacagtttgccgttgaaactatacagaatgaatggaaggtatatgtgaagaaacctctagacagggaaaaaagggacaattaccttcttactatcacggcaactgatggcaccttctcatcaaaagcgatagttgaagtgaaagttctggatgcaaatgacaacagtccagtttgtgaaaagactttatattcagacactattcctgaagacgtccttcctggaaaattgatcatgcagatctctgctacagacgcagacatccgctctaacgctgaaattacttacacgttattgggttcaggtgcagaaaaattcaaactaaatccagacacaggtgaactgaaaacgtcaaccccccttgatcgtgaggagcaagctgtttatcatcttctcgtcagggccacagatggaggaggaagattctgccaagccagtattgtcgtcacgctagaagatgtgaacgataacgcccccgaattctctgccgatccttatgccatcaccgtgtttgaaaacacagagccgggaacgctgctgacaagagtgcaggccacagatgccgacgcaggattaaatcggaagattttatactcactgattgactctgctgatgggcagttctccattaacgaattatctggaattattcagttagaaaaacctttggacagagaactccaggcagtatacaccctctctttgaaagctgtggatcaaggcttgccaaggaggctgactgccactggcactgtgattgtatcagttcttgacataaatgacaacccccctgtgtttgagtaccgtgaatatggtgccaccgtgtctgaggacattcttgttggaactgaagttcttcaagtgtatgcagcaagtcgggatattgaagcaaatgcagaaatcacctactcaataataagtggaaatgaacatgggaaattcagcatagattctaaaacaggggccgtatttatcattgagaatctggattatgagagctctcatgagtattacctaacagtagaggccactgatggaggcacgccttcactgagcgacgttgccactgtgaacgttaatgtaacagatatcaacgataatacccctgtgttcagccaagacacctacacgacagtcatcagtgaagatgccgttcttgagcagtctgtcatcacggttatggccgatgatgccgatggaccttccaacagccacatccactactcaattatagatggcaaccaaggaagctcgttcacaattgaccccgtcaggggagaagtcaaagtgaccaaacttctcgaccgagaaacgatttcaggttacacgctcacggttcaagcttctgataatggcagtccacccagagtcaacacgacgaccgtgaacatcgatgtgtccgatgtcaatgacaacgcgcccgtcttctccaggggaaactacagtgtcattatccaggaaaataagccagtgggcttcagcgtgctgcagctggtagtaacagatgaggattcttcccataacggtccacccttcttctttactattgtaactggaaatgatgagaaggcttttgaagttaacccgcaaggagtcctcctgacatcatctgccatcaagaggaaggagaaagatcattacttactgcaggtgaaggtggcagataatggaaagcctcagttgtcatctttgacatacattgacattagggtaattgaggagagcatctatccgcctgcgattttgcccctggagattttcatcacctcttctggagaagaatactcaggtggcgtcattgggaagatccatgccacagaccaggacgtgtatgatactctaacctacagtctcgaccctcagatggacaacctgttctctgtttccagcacagggggcaagctgatagcacacaaaaagctagacatagggcaataccttctcaatgtcagcgtaacagatgggaagttcacgacggtggccgacatcacagtgcatatcagacaagtcacacaggagatgttgaaccacaccatcgcgatccgctttgccaacctcactccggaagaattcgttggtgactactggcgcaacttccagcgagctttacggaacatcctgggtgtgaggaggaacgacatacagattgttagtttgcagtcctctgaacctcacccacatctggacgtcttactttttgtagagaaaccaggtagtgctcagatctcaacaaaacaacttctgcacaagattaactcttccgtgactgacattgaggaaatcattggagttaggatactgaatgtattccagaaactctgcgcgggactggactgcccctggaagttctgcgatgaaaaggtgtctgtggatgaaagtgtgatgtcaacacacagcacagccagactgagttttgtgactccccgccaccacagggcagcggtgtgtctctgcaaagagggaaggtgcccacctgtccaccatggctgtgaagatgatccgtgccctgagggatccgaatgtgtgtctgatccctgggaggagaaacacacctgtgtctgtcccagcggcaggtttggtcagtgcccagggagttcatctatgacactgactggaaacagctacgtgaaataccgtctgacggaaaatgaaaacaaattagagatgaaactgaccatgaggctcagaacatattccacgcatgcggttgtcatgtatgctcgaggaactgactatagcatcttggagattcatcatggaaggctgcagtacaagtttgactgtggaagtggccctggaattgtctctgttcagagcattcaggtcaatgatgggcagtggcacgcagtggccctggaagtgaatggaaactatgctcgcttggttctagaccaagttcatactgcatcgggcacagccccagggactctgaaaaccctgaacctggataactatgtgttttttggtggccacatccgtcagcagggaacaaggcatggaagaagtcctcaagttggtaatggtttcaggggttgtatggactccatttatttgaatgggcaggagctccctttaaacagcaaacccagaagctatgcacacatcgaagagtcggtggatgtatctccaggctgcttcctgacggccacggaagactgcgccagcaacccttgccagaatggaggcgtttgcaatccgtcacctgctggaggttattactgcaaatgcagtgccttgtacatagggacccactgtgagataagcgtcaatccgtgttcctccaacccatgcctctatgggggcacgtgtgttgtcgacaacggaggctttgtttgccagtgtagaggattatatactggtcagaggtgtcagcttagtccatactgcaaagatgaaccctgtaagaatggcggaacatgctttgacagtttggatggcgccgtttgtcagtgtgattcgggttttaggggagaaaggtgtcagagtgatatcgacgagtgctctggaaacccttgcctgcacggggccctctgtgagaacacgcacggctcctatcactgcaactgcagccacgagtacaggggacgtcactgcgaggatgctgcgcccaaccagtatgtgtccacgccgtggaacattgggttggcggaaggaattggaatcgttgtgtttgttgcagggatatttttactggtggtggtgtttgttctctgccgtaagatgattagtcggaaaaagaagcatcaggctgaacctaaagacaagcacctgggacccgctacggctttcttgcaaagaccgtattttgattccaagctaaataagaacatttactcagacataccaccccaggtgcctgtccggcctatttcctacaccccgagtattccaagtgactcaagaaacaatctggaccgaaattccttcgaaggatctgctatcccagagcatcccgaattcagcacttttaaccccgagtctgtgcacgggcaccgaaaagcagtggcggtctgcagcgtggcgccaaacctgcctcccccacccccttcaaactccccttctgacagcgactccatccagaagcctagctgggactttgactatgacacaaaagtggtggatcttgatccctgtctttccaagaagcctctagaggaaaagccttcccagccatacagtgcccgggaaagcctgtctgaagtgcagtccctgagctccttccagtccgaatcgtgcgatgacaatgggtatcactgggatacatcagattggatgccaagcgttcctctgccggacatacaagagttccccaactatgaggtgattgatgagcagacacccctgtactcagcagatccaaacgccatcgatacggactattaccctggaggctacgacatcgaaagtgattttcctccacccccagaagacttccccgcagctgatgagctaccaccgttaccgcccgaattcagcaatcagtttgaatccatccaccctcctagagacatgcctgccgcgggtagcttgggttcttcatcaagaaaccggcagaggttcaacttgaatcagtatttgcccaatttttatcccctcgatatgtctgaacctcaaacaaaaggcactggtgagaatagtacttgtagagaaccccatgccccttacccgccagggtatcaaagacacttcgaggcgcccgctgtcgagagcatgcccatgtctgtgtacgcctccaccgcctcctgctctgacgtgtcagcctgctgcgaagtggagtccgaggtcatgatgagtgactatgagagcggggacgacggccacttcgaagaggtgacgatcccgcccctggattcccagcagcacacggaagtctgactctcaactccccccaaagtgcctgactttagtgaacctagaggtgatgtgagtaatccgcgctgttctttgcagcagtgcttccaagctttttttggtgagccgaatgggcatggctgcgctggatcctgcgcctctggacgtgctagccatttccagtgtcccaactactgtcatcgtgaggttttcatcggctgtgccatttcccaacgtcttttgggatttacatctgtctgtgttaaaataatcaaacgaaaaatcagtcctgtgttgtcagcatgattcatgtatttatatagatttgattattttaattttcctgtctcttttttttgtaaattttatgtacagatttgatttttcatagttttaactagatttccaagatattttgtgcatttgtttcaactgaattttggtggtgtcagtgccattatctagcaccctgatttttttttttttactataaccagggtttcattctgtctttttccactgaagtgtgacattttgttagtacatttcagtgtagtcattcatttctagctgtacataggatgaaggagagatcagatacatgaacatgtcttacatgggttgctgtatttagaattataaacatttttcattattggaaagtgtaacggggaccttctgcatacctgtttagaaccaaaaccaccatgacacagtttttatagtgtctgtatatttgtgatgcaatggtcttgtaaaggtttttaatgaaaactaccattagccagtctttcttactgacaataaattattaataaaat

SEQ ID NO: 135 - DNA, 1079 bp, Homo sapiens
cggactccggagccgcacaaaccagggctcgccatgaagccaggattcagtccccgtgggggtggctttggcggccgagggggctttggtgaccgtggtggtcgtggaggccgagggggctttggcgggggccgaggtcgaggcggaggctttagaggtcgtggacgaggaggaggtggaggcggcggcggcggtggaggaggaggaagaggtggtggaggcttccattctggtggcaaccggggtcgtggtcggggaggaaaaagaggaaaccagtcggggaagaatgtgatggtggagccgcatcggcatgagggtgtcttcatttgtcgaggaaaggaagatgcactggtcaccaagaacctggtccctggggaatcagtttatggagagaagagagtctcgatttcggaaggagatgacaaaattgagtaccgagcctggaaccccttccgctccaagctagcagcagcaatcctgggtggtgtggaccagatccacatcaaaccgggggctaaggttctctacctcggggctgcctcgggcaccacggtctcccatgtctctgacatcgttggtccggatggtctagtctatgcagtcgagttctcccaccgctctggccgtgacctcattaacttggccaagaagaggaccaacatcattcctgtgatcgaggatgctcgacacccacacaaataccgcatgctcatcgcaatggtggatgtgatctttgctgatgtggcccagccagaccagacccggattgtggccctgaatgcccacaccttcctgcgtaatggaggacactttgtgatttccattaaggccaactgcattgactccacagcctcagccgaggccgtgtttgcctccgaagtgaaaaagatgcaacaggagaacatgaagccgcaggagcagttgacccttgagccatatgaaagagaccatgccgtggtcgtgggagtgtacaggccaccccccaaggtgaagaactgaagttcagcgctgtcaggattgcgagagatgtgtgttgatactgttgcacgtgtgtttttctattaaaagactcatccgtc

SEQ ID NO: 136 - DNA, 6728 bp, Homo sapiens
agcagacgggagtttctcctcggggtcggagcaggaggcacgcggagtgtgaggccacgcatgagcggacgctaaccccctccccagccacaaagagtctacatgtctagggtctagacatgttcagctttgtggacctccggctcctgctcctcttagcggccaccgccctcctgacgcacggccaagaggaaggccaagtcgagggccaagacgaagacatcccaccaatcacctgcgtacagaacggcctcaggtaccatgaccgagacgtgtggaaacccgagccctgccggatctgcgtctgcgacaacggcaaggtgttgtgcgatgacgtgatctgtgacgagaccaagaactgccccggcgccgaagtccccgagggcgagtgctgtcccgtctgccccgacggctcagagtcacccaccgaccaagaaaccaccggcgtcgagggacccaagggagacactggcccccgaggcccaaggggacccgcaggcccccctggccgagatggcatccctggacagcctggacttcccggaccccccggaccccccggacctcccggaccccctggcctcggaggaaactttgctccccagctgtcttatggctatgatgagaaatcaaccggaggaatttccgtgcctggccccatgggtccctctggtcctcgtggtctccctggcccccctggtgcacctggtccccaaggcttccaaggtccccctggtgagcctggcgagcctggagcttcaggtcccatgggtccccgaggtcccccaggtccccctggaaagaatggagatgatggggaagctggaaaacctggtcgtcctggtgagcgtgggcctcctgggcctcagggtgctcgaggattgcccggaacagctggcctccctggaatgaagggacacagaggtttcagtggtttggatggtgccaagggagatgctggtcctgctggtcctaagggtgagcctggcagccctggtgaaaatggagctcctggtcagatgggcccccgtggcctgcctggtgagagaggtcgccctggagcccctggccctgctggtgctcgtggaaatgatggtgctactggtgctgccgggccccctggtcccaccggccccgctggtcctcctggcttccctggtgctgttggtgctaagggtgaagctggtccccaagggccccgaggctctgaaggtccccagggtgtgcgtggtgagcctggcccccctggccctgctggtgctgctggccctgctggaaaccctggtgctgatggacagcctggtgctaaaggtgccaatggtgctcctggtattgctggtgctcctggcttccctggtgcccgaggcccctctggaccccagggccccggcggccctcctggtcccaagggtaacagcggtgaacctggtgctcctggcagcaaaggagacactggtgctaagggagagcctggccctgttggtgttcaaggaccccctggccctgctggagaggaaggaaagcgaggagctcgaggtgaacccggacccactggcctgcccggaccccctggcgagcgtggtggacctggtagccgtggtttccctggcgcagatggtgttgctggtcccaagggtcccgctggtgaacgtggttctcctggccccgctggccccaaaggatctcctggtgaagctggtcgtcccggtgaagctggtctgcctggtgccaagggtctgactggaagccctggcagccctggtcctgatggcaaaactggcccccctggtcccgccggtcaagatggtcgccccggacccccaggcccacctggtgcccgtggtcaggctggtgtgatgggattccctggacctaaaggtgctgctggagagcccggcaaggctggagagcgaggtgttcccggaccccctggcgctgtcggtcctgctggcaaagatggagaggctggagctcagggaccccctggccctgctggtcccgctggcgagagaggtgaacaaggccctgctggctcccccggattccagggtctccctggtcctgctggtcctccaggtgaagcaggcaaacctggtgaacagggtgttcctggagaccttggcgcccctggcccctctggagcaagaggcgagagaggtttccctggcgagcgtggtgtgcaaggtccccctggtcctgctggaccccgaggggccaacggtgctcccggcaacgatggtgctaagggtgatgctggtgcccctggagctcccggtagccagggcgcccctggccttcagggaatgcctggtgaacgtggtgcagctggtcttccagggcctaagggtgacagaggtgatgctggtcccaaaggtgctgatggctctcctggcaaagatggcgtccgtggtctgaccggccccattggtcctcctggccctgctggtgcccctggtgacaagggtgaaagtggtcccagcggccctgctggtcccactggagctcgtggtgcccccggagaccgtggtgagcctggtccccccggccctgctggctttgctggcccccctggtgctgacggccaacctggtgctaaaggcgaacctggtgatgctggtgccaaaggcgatgctggtccccctgggcctgccggacccgctggaccccctggccccattggtaatgttggtgctcctggagccaaaggtgctcgcggcagcgctggtccccctggtgctactggtttccctggtgctgctggccgagtcggtcctcctggcccctctggaaatgctggaccccctggccctcctggtcctgctggcaaagaaggcggcaaaggtccccgtggtgagactggccctgctggacgtcctggtgaagttggtccccctggtccccctggccctgctggcgagaaaggatcccctggtgctgatggtcctgctggtgctcctggtactcccgggcctcaaggtattgctggacagcgtggtgtggtcggcctgcctggtcagagaggagagagaggcttccctggtcttcctggcccctctggtgaacctggcaaacaaggtccctctggagcaagtggtgaacgtggtccccccggtcccatgggcccccctggattggctggaccccctggtgaatctggacgtgagggggctcctgctgccgaaggttcccctggacgagacggttctcctggcgccaagggtgaccgtggtgagaccggccccgctggaccccctggtgctcctggtgctcctggtgcccctggccccgttggccctgctggcaagagtggtgatcgtggtgagactggtcctgctggtcccgccggtcccgtcggccccgtcggcgcccgtggccccgccggaccccaaggcccccgtggtgacaagggtgagacaggcgaacagggcgacagaggcataaagggtcaccgtggcttctctggcctccagggtccccctggccctcctggctctcctggtgaacaaggtccctctggagcctctggtcctgctggtccccgaggtccccctggctctgctggtgctcctggcaaagatggactcaacggtctccctggccccattgggccccctggtcctcgcggtcgcactggtgatgctggtcctgttggtccccccggccctcctggacctcctggtccccctggtcctcccagcgctggtttcgacttcagcttcctgccccagccacctcaagagaaggctcacgatggtggccgctactaccgggctgatgatgccaatgtggttcgtgaccgtgacctcgaggtggacaccaccctcaagagcctgagccagcagatcgagaacatccggagcccagagggaagccgcaagaaccccgcccgcacctgccgtgacctcaagatgtgccactctgactggaagagtggagagtactggattgaccccaaccaaggctgcaacctggatgccatcaaagtcttctgcaacatggagactggtgagacctgcgtgtaccccactcagcccagtgtggcccagaagaactggtacatcagcaagaaccccaaggacaagaggcatgtctggttcggcgagagcatgaccgatggattccagttcgagtatggcggccagggctccgaccctgccgatgtggccatccagctgaccttcctgcgcctgatgtccaccgaggcctcccagaacatcacctaccactgcaagaacagcgtggcctacatggaccagcagactggcaacctcaagaaggccctgctcctcaagggctccaacgagatcgagatccgcgccgagggcaacagccgcttcacctacagcgtcactgtcgatggctgcacgagtcacaccggagcctggggcaagacagtgattgaatacaaaaccaccaagtcctcccgcctgcccatcatcgatgtggcccccttggacgttggtgccccagaccaggaattcggcttcgacgttggccctgtctgcttcctgtaaactccctccatcccaacctggctccctcccacccaaccaactttccccccaacccggaaacagacaagcaacccaaactgaacccccccaaaagccaaaaaatgggagacaatttcacatggactttggaaaatatttttttcctttgcattcatctctcaaacttagtttttatctttgaccaaccgaacatgaccaaaaaccaaaagtgcattcaaccttaccaaaaaaaaaaaaaaaaaaaaaagaataaataaataagtttttaaaaaaggaagcttggtccacttgcttgaagacccatgcgggggtaagtccctttctgcccgttgggttatgaaaccccaatgctgccctttctgctcctttctccacaccccccttggcctcccctccactccttcccaaatctgtctccccagaagacacaggaaacaatgtattgtctgcccagcaatcaaaggcaatgctcaaacacccaagtggcccccaccctcagcccgctcctgcccgcccagcacccccaggccctggggacctggggttctcagactgccaaagaagccttgccatctggcgctcccatggctcttgcaacatctccccttcgtttttgagggggtcatgccgggggagccaccagcccctcactgggttcggaggagagtcaggaagggccacgacaaagcagaaacatcggatttggggaacgcgtgtcatcccttgtgccgcaggctgggcgggagagactgttctgttctgttccttgtgtaactgtgttgctgaaagactacctcgttcttgtcttgatgtgtcaccggggcaactgcctgggggcggggatgggggcagggtggaagcggctccccatttttataccaaaggtgctacatctatgtgatgggtggggtggggagggaatcactggtgctatagaaattgagatgcccccccaggccagcaaatgttcctttttgttcaaagtctatttttattccttgatattttttctttctttttttttttttttgtggatggggacttgtgaatttttctaaaggtgctatttaacatgggaggagagcgtgtgcgctccagcccagcccgctgctcactttccaccctctctccacctgcctctggcttctcaggcctctgctctccgacctctctcctctgaaaccctcctccacagctgcagcccatcctcccggctccctcctagtctgtcctgcgtcctctgtccccgggtttcagagacaacttcccaaagcacaaagcagtttttccctaggggtgggaggaagcaaaagactctgtacctattttgtatgtgtataataatttgagatgtttttaattattttgattgctggaataaagcatgtggaaatgacccaaacataatccgcagtggcctcctaatttccttctttggagttgggggaggggtagacatggggaaggggccttggggtgatgggcttgccttccattcctgccctttccctccccactattctcttctagatccctccataaccccactcccctttctctcacccttcttataccgcaaacctttctacttcctctttcattttctattcttgcaatttccttgcaccttttccaaatcctcttctcccctgcaataccatacaggcaatccacgtgcacaacacacacacacactcttcacatctggggttgtccaaacctcatacccactccccttcaagcccatccactctccaccccctggatgccctgcacttggtggcggtgggatgctcatggatactgggagggtgaggggagtggaacccgtgaggaggacctgggggcctctccttgaactgacatgaagggtcatctggcctctgctcccttctcacccacgctgacctcctgccgaaggagcaacgcaacaggagaggggtctgctgagcctggcgagggtctgggagggaccaggaggaaggcgtgctccctgctcgctgtcctggccctgggggagtgagggagacagacacctgggagagctgtggggaaggcactcgcaccgtgctcttgggaaggaaggagacctggccctgctcaccacggactgggtgcctcgacctcctgaatccccagaacacaacccccctgggctggggtggtctggggaaccatcgtgcccccgcctcccgcctactcctttttaagctt

SEQ ID NO: 137 - DNA, 4182 bp, Homo sapiens; identical to SEQ ID NO: 66

SEQ ID NO: 138 - DNA, 2835 bp, Homo sapiens
cgcccgggcaggtcggagacggaggaaaggtggcagccagattacttagagaggcacagaggagagagatcggggtgagtcgccatggggactcccagggcccagcacccgccgcctccccagctgctgttcctaattctgctgagctgtccctggatccagggtctgcccctgaaggaggaggagatattgccagagcctggaagtgagacccccacggtggcctctgaggccctggctgaactgcttcatggggccctgctgaggaggggcccagagatgggctacctgccagggcctccccttgggcctgagggaggagaggaggagacgacgaccaccatcatcaccacgacaactgttaccactacggtgaccagcccagttctgtgtaataacaacatctccgagggcgaagggtatgtggagtctccagatctggggagccccgtcagccgcaccctggggctcctggactgcacttacagcatccatgtctaccctggctacggcattgagatccaggtgcagacgctgaacctgtcacaggaagaggagctcctggtgctggctggtgggggatccccaggcctggccccccgactcctggccaactcatccatgcttggagaaggacaagtccttcggagcccaaccaaccggctgcttctgcacttccagagcccacgggtcccaaggggcggtggcttcaggatccactatcaggcctacctcctgagctgtggcttccctccccggccggcccatggggacgtgagtgtgacggacctgcaccctgggggcactgccacctttcactgtgattcgggctaccagctgcagggagaggagaccctcatctgcctcaatggcacccggccatcctggaacggtgaaacccccagctgcatggcatcctgtggtggcaccatccacaatgccaccctgggccgcatcgtgtccccagagcctgggggagccgtagggcccaacctcacctgccgttgggtcattgaagcagctgaggggcgccggctgcacctgcactttgaaagggtctcgctggatgaggacaatgaccggctgatggtgcgctcagggggcagccccctatcccccgtgatctatgattcggacatggacgatgtccccgagcggggtctcatcagtgacgcccagtccctctacgtggagctgctgtcagagacacctgccaatcccctgctgttaagccttcgatttgaagcctttgaggaggatcgctgcttcgcccccttcctggcacatggaaatgtcactaccacggaccctgagtatcgcccaggggcactggcaaccttctcgtgcctcccaggatatgccctggagccccctgggccccccaatgccatcgaatgtgtggatcccacagaaccccactggaacgacacagagccggcctgcaaagccatgtgtggaggggagctgtcggaaccagctggcgtggtcctctctcccgactggccccagagctatagcccgggccaagactgcgtgtggggcgtgcacgtccaggaagagaagcgcatcttgctccaagttgagatattgaatgtgcgggaaggggacatgctgacgctgttcgacggggacggtcccagcgcccgagtcttggcccagctgcggggacctcagccgcgccgccgccttctctcctctgggcccgacctcacactgcagtttcaggcaccgcccgggcccccaaatccaggcctgggccagggcttcgtattgcacttcaaagaggtcccgaggaacgacacgtgccccgagctgccacctccggagtggggctggagaacggcatcccacggggacctgatccggggcacggtgctcacctaccagtgcgagcctggctacgagctgctaggctccgacattctcacttgccagtgggacctgtcttggagcgccgcgccgcccgcctgccaaaagatcatgacttgtgctgaccctggcgagattgccaacgggcaccgcaccgcctcggacgccggcttccccgttggctcccacgtccagtaccgctgcctgccagggtacagcctcgagggggcagccatgctcacctgctacagccgggacacaggcacacccaagtggagcgatagggtccccaaatgcgccttgaagtacgagccgtgcctgaacccgggggttcccgagaatggctaccagacgctgtacaagcaccactaccaggcgggcgagtctctgcgcttcttctgctatgagggctttgagcttatcggcgaggtcaccatcacctgtgtgcccggccacccctcccagtggaccagccagcccccactctgcaaagttgcctatgaggagctcctggacaaccgaaaactggaagtgacccagaccacagatccatcacggcagctggaaggggggaacctggccctggccatcctgctgcctctaggcttggtcattgtcctcggcagtggcgtttacatctactacaccaagcttcagggaaagtcccttttcggcttctcgggctcccactcctacagccccatcaccgtggagtcggacttcagcaacccgctgtatgaagctggggatacgcgggagtatgaagtttccatctgaaccccaagactacagctgcaggacccaggacgcccctcccctcctcattcgggcagagggaaatacgggacccggtctctgcctcctggctgccctcctccctggctgtgtaaatagtctccctatcccacgagggggctttgatggccctggagatcctacagtaaataaaccagcatcctgccgccc

SEQ ID NO: 139 - DNA, 2116 bp, Homo sapiens
cggttctccaagcacccagcatcctgctagacgcgccgcgcaccgacggaggggacatgggcagagcaatggtggccaggctggggctggggctgctgctgctggcactgctcctacccacgcagatttattccagtgaaacaacaactggaacttcaagtaactcctcccagagtacttccaactctgggttggccccaaatccaactaatgccaccaccaaggcggctggtggtgccctgcagtcaacagccagtctcttcgtggtctcactctctcttctgcatctctactcttaagagactcaggccaagaaacgtcttctaaatttccccatcttctaaacccaatccaaatggcgtctggaagtccaatgtggcaaggaaaaacaggtcttcatcgaatctactaattccacaccttttattgacacagaaaatgttgagaatcccaaatttgattgatttgaagaacatgtgagaggtttgactagatgatgaatgccaatattaaatctgctggagtttcatgtacaagatgaaggagaggcaacatccaaaatagttaagacatgatttccttgaatgtggcttgagaaatatggacacttaatactaccttgaaaataagaatagaaataaaggatgggattgtggaatggagattcagttttcattggttcattaattctataaggccataaaacaggtaatataaaaagcttccatcgatctatttatatgtacatgagaaggaatccccaggtgttactgtaattcctcaacgtattgtttcgacggcactaatttaatgccgatatactctagatgaatgtttacattgttgagctattgctgttctcttgggaactgaactcactttcctcctgaggctttggatttgacattgcatttgaccttttaggtagtaattgacatgtgccagggcaatgatgaatgagaatctaccccagatccaagcatcctgagcaactcttgattatccatattgagtcaaatggtaggcatttcctatcacctgtttccattcaacaagagcactacattcttttagctaaacggattccaaagagtagaattgcattgaccacgactaatttcaaaatgctttttattattattattttttagacagtctcactttgtcgcccaggccggagtgcagtggtgcgatctcagatcagtgtaccatttgcctcccgggctcaagcgattctcctgcctcagcctcccaagtagctgggattacaggcacctgccaccatgcccggctaatttttgtaattttagtagagacagggtttcaccatgttgcccaggctggtttagaactcctgacctcaggtgatccacccgcctcggcctcccaaagtgctgggattacaggcttgagcccccgcgcccagccatcaaaatgctttttatttctgcatatgtttgaatactttttacaatttaaaaaaatgatctgttttgaaggcaaaattgcaaatcttgaaattaagaaggcaaaatgtaaaggagtcaaactataaatcaagtatttgggaagtgaagactggaagctaatttgcataaattcacaaacttttatactctttctgtatatacattttttttctttaaaaaacaactatggatcagaatagcaacatttagaacactttttgttatcagtcaatatttttagatagttagaacctggtcctaagcctaaaagtgggcttgattctgcagtaaatcttttacaactgcctcgacacacataaacctttttaaaaatagacactccccgaagtcttttgtttgtatggtcacacactgatgcttagatgttccagtaatctaatatggccacagtagtcttgatgaccaaagtcctttttttccatctttagaaaactacatgggaacaaacagatcgaacagttttgaagctactgtgtgtgtgaatgaacactcttgctttattccagaatgctgtacatctattttggattgtatattgtggttgtgtatttacgctttgattcatagtaacttcttatggaattgatttgcattgaacgacaaactgtaaataaaaagaaacggtg

SEQ ID NO: 140 - DNA, 2315 bp, Homo sapiens
aaggacgccgtcgcgaccgccatgcagctgacggtgaaggcgctgcagggccgcgagtgcagcctgcaggtgccagaggacgagctggtgtccacgctgaagcagctggtctccgagaagctgaacgtcccagtgcgccagcagcggctgctgttcaagggcaaggccctggcagatgggaaacgactctcggattatagcatcgggcccaactccaagctcaacctagtggtcaaacccctggagaaggtgctactagaagaaggcgaggcccagaggctggccgactccccacccccgcaggtctggcagctgatctccaaagtcttggcccgccacttcagtgcggcagatgccagcagggtcctggaacagctacagagggattacgagaggtccctgagtcgcctgacgctggacgacatcgaacggttggccagccgcttcctgcaccctgaagtgactgagacaatggagaagggcttctccaaatagaattctcggagcatggggaggtgcccaacgccaggctaccgctgcatgtcgcactaagtgtgttctcctgttgcagttgggctcatcatcgtcatagctggcatgtacctggctctggccaggtgctaggcactcctcacagcttgacctgggtttgcttccacaccctcagaagaggagagccggcacagcagaggcaccggcgatgaagtggcacagccccagtcggaatccagcggcttctgaaagtgccttggtgtgagaaggaggaaggggccgcttggagagctgggctctcgcatgtcatgtttagcccactgagaatataccctcaggtgactccctcccgatcctgaaagggaaagcagctgtcacctgacttctggcgggtccaacatagccctcagcttacctctgcaggaggccgagtgacagccagccctggaaccccccgacccccgcagctgctgcagccagtgtgccagtgtgcgttcgacaaatggaaaagcagattggggccagggagtcagcaaggcaccccagctctgtgatgtgactttgggcgagtctcagtgccacttggtccccagccatggactctatacagtgagggccactcaccgacctgagtcagtgtcctctgtctcacagggcccctctcccttctgttcagtaaacaaactgaagccaaaaatgaagccgtggccaagcgtgacccagagatggggtgtcctggcccttagtgacacagctcctctctggggcaccctatctgcttgtctcgtccaggaagcgttagggctgatgggtgactcagcaaggcagtgtcagagctgggactgggcgtaggcctttgtcctcatccccagcactggcctccctgtggaagatgaacatatcccagccacctgtgtacaggggctcactttgtgtgctccttgttgcctgagaagaaaccttggggtgccagggtgggggcagaagcatgggctgggttccggttcatcctcctccaccctgccgtgtgtgtgggcacaagaggacatctaaccacctgctccttggaggaggcccccaggggtggtagaggctggaaggaagccacatcaggaggacgccactccggcccttcacccttgccaagtgagctgctcacagtgtggtcagggctgcgcgtgctggaggccctcctgcctgggccttgtggggcaaatattgggtccccaggctggaaagatggacagaggcccaatgggtgaaggctttgaagagcacacagaagcccctggccccccacgagagctggagagccatgtatatggcttcaaagccacctacggcagggacacactcgtgagcatgtgtggcctgcagttcaggtgatacatttaccagtgttcttgtttgtgtggtgccaggaaattgattttggaaaaagtgaaataacattaaaggtgaatgtgaggcttctacttttatccaaaaggagctatattagctaggctgtttctgatatccaatcattggtttaacaataaaggcaatttgtttaatcagttaacggaaatttcttggcttatgaaagtgaaaagtccagtggtattggcattggcagcaggtgagcaatttcacccagtgtcttctgcctccctctgcgttggtatctgctacatcccaggccaccacctccgaggatgaaaagatggctgcctgcagcttccacggaatccctccctcactgccagagcagcatcttctctgtgtaccacctctgctgtctcagatgcccccagcaaataaacactcttctcgttggtcag

SEQ ID NO: 141 - DNA, 3583 bp, Homo sapiens
cccgggtgtcccactctgggagaggtgggaggatgagggcagaggcgtagcccccctgccccctctcaagctcagtggagcgtttcgcagccagaccagaaaggaggaggtaggaagccaccagacagggagcgggggcgggccgtctgtgggtatgcagggccaggcgccgccagcagtcctagcgcgtggggtgggccgagcagtccgcgggggcgagcgtaccttctggccctcccttctccatgtcccagctcccagatgacgccaacttggcccgactggttcctgctcccaactcccccgcgtcgttgctttgggaggggtccgccggccagggcggtcgatgcgcgcgtgctaggcgggaccccggggggctcctcccgggcgcaattgggccggggggcggggccggggcgcggacggggcaggagggcggggccgggaagcgcgggcggcgggcgcgcccctctcgctgcttccggcggcggcgggcggttccagcgcgcgcgcccggggcggcggcgcgcggcggggggtggttggggtgcgcgccggcccgagtggacgccgtcgcgaccgccatgcagctgacggtgaaggcgctgcagggccgcgagtgcagcctgcaggtagggtccccgggccgggccgccgggtccggcgcgctctctcgcccgctcctggcagggggaccggcagggccgagggcgggcacggggaggccgggccgagggccgggagccgggagagctgccctcgggggcggacgcgtgggcttcgccgtctgggggccgcgggctcaacccttgcctcccaccctccgcgcggccaggtgccagaggacgagctggtgtccacgctgaagcagctggtctccgagaagctgaacgtcccagtgcgccagcagcggctgctgttcaagggcaaggccctggcaggtacccagggagaggagacgcccggggagccccgcaggaagcgggaccggggtgcgcgggccgaggccagcagccgtgtgtcgggtcggggtgcgggcgccaagcgccacatgaccccaagggaggcggccgcatgcctcacagccggatgccgcagcgctccgctccccgcccgaggcggcctcgcgccccgggccacccccacggcggtggaggaggaggaacccatcgatctgtctttggcagatgggaaacgactctcggattatagcatcgggcccaactccaagctcaacctagtggtcaaacccctggagaaggtgctactagaagaaggcgaggcccagaggctggccgactccccacccccgcaggtctggcagctgatctccaaagtcttggcccgccacttcagtgcggcagatgccagcagggtcctggaacagctacagagggtgagaagggtaaccctgggcatcctcttcaggcccagttgctcccagcccctacctctgttgcagtgtatgccccccccccactggcagcccctgaatcttcctgcccttctctccccaggattacgagaggtccctgagtcgcctgacgctggacgacatcgaacggttggccagccgcttcctgcaccctgaagtgactgagacaatggagaagggcttctccaaatagaattctcggagcatggggaggtgcccaacgccaggctaccgctgcatgtcgcactaagtgtgttctcctgttgcagttgggctcatcatcgtcatagctggcatgtacctggctctggccaggtgctaggcactcctcacagcttgacctgggtttgcttccacaccctcagaagaggagagccggcacagcagaggcaccggcgatgaagtggcacagccccagtcggaatccagcggcttctgaaagtgccttggtgtgagaaggaggaaggggccgcttggagagctgggctctcgcatgtcatgtttagcccactgagaatataccctcaggtgactcctcccgatcctgaaagggaaagcagctgtcacctgacttctggcgggtccaacatagccctcagcttacctctgcaggaggccgagtgacagccagccctggaaccccccgacccccgcagctgctgcagccagtgtgccagtgtgcgttcgacaaatggaaaagcagattggggccagggagtcagcaaggcaccccagctctgtgatgtgactttgggcgagtctcagtgccacttggtccccagccatggactctatacagtgagggccactcaccgacctgagtcagtgtcctctgtctcacagggcccctctcccttctgttcagtaaacaaactgaagccaaaaatgaagccgtggccaagcgtgacccagagatggggtgtcctggcccttagtgacacagctcctctctggggcaccctatctgcttgtctcgtccaggaagcgttagggcgatggggactcggcaaggcagtgtcagagctgggactgggcgtaggcctttgtcctcatccccagcactggcctccctgtgggaagatgaacatatcccagccacctgtgtacaggggctcactttgtgtgctccttgttgcctggagaagaaccttggggtgccagggtgggggcagaagcatgggctgggttccggttcatcctcctccaccctgccgtgtgtgtgggcacaagaggacatctaaccacctgctccttggaggaggcccccaggggtggtagaggctggaaggaagccacatcaggaggacgccactccggcccttcacccttgccaagtgagctgctcacagtgtggtcagggctgcgcgtgctggaggccctcctgcctgggccttgtggggcaaatattgggtccccaggctggaaagatggacagaggcccaatgggtgaaggctttgaagagcacacagaagcccctggccccccacgagagctggagagccatgtatatggcttcaaagccacctacggcagggacacactcgtgagcatgtgtggcctgcagttcaggtgatacatttaccagtgttcttgtttgtgtggtgccaggaaattgattttggaaaaagtgaaataacattaaaggtgaatgtgaggcttctacttttatccaaaaggagctatattagctaggctgtttctgatatccaatcattggtttaacaataaaggcaatttgtttaatcagttaacggaaatttcttggcttatgaaatgaaaagtccagtggtattggcattggcagcaggtgagcaatttcacccagtgtcttctgcctccctctgcgttggtatctgctacatcccaggccaccacctccgaggatgaaaagatggctgcctgcagcttccacggaatccctccctcactgccagagcagcatcttctctgtgtaccacctctgctgtctcagatgcccccagcaaataaacactcttctcgttggtcagaactggattgtgcgtccaatcattttggctggggtagggggtaattctccgtcagggctggctccacttggagctaggcatggggaccacttttcactggacacacatcggctatgcaatgggacagcaaggactact

SEQ ID NO: 142 - DNA, 3090 bp, Homo sapiens
aaagattccgaggtgcagaagttgtctgagtgcgttggtcggcggcagtcgggccagacccaggactctgcgactttacatctttaaatggatgagatggctaccactcagatttccaaagatgagcttgatgaactcaaagaggcctttgcaaaagttgatctcaacagcaacggattcatttgtgactatgaacttcatgagctcttcaaggaagctaatatgccattaccaggatataaagtgagagaaattattcagaaactcatgctggatggtgacaggaataaagatgggaaaataagttttgacgaatttgtttatatttttcaagaggtaaaaagtagtgatattgccaagaccttccgcaaagcaatcaacaggaaagaaggtatttgtgctctgggtggaacttcagagttgtccagcgaaggaacacagcattcttactcagaggaagaaaaatatgcttttgttaactggataaacaaagctttggaaaatgatcctgattgtagacatgttataccaatgaaccctaacaccgatgacctgttcaaagctgttggtgatggaattgtgctttggtaaaatgattaacctttcagttcctgataccattgatgaaagagcaatcaacaagaagaaacttacacccttcatcattcaggaaaacttgaacttggcactgaactctgcttctgccattgggtgtcatgttgtgaacattggtgcagaagatttgagggctgggaaacctcatctggttttgggactgctttggcagatcattaagatcggtttgttcgctgacattgaattaagcaggaatgaagccttggctgctttactccgagatggtgagactttggaggaacttatgaaattgtctccagaagagcttctgcttagatgggcaaactttcatttggaaaactcgggctggcaaaaaattaacaactttagtgctgacatcaaggattccaaagcctatttccatcttctcaatcaaatcgcaccaaaaggacaaaaggaaggtgaaccacggatagatattaacatgtcaggtttcaatgaaacagatgatttgaagagagctgagagtatgcttcaacaagcagataaattaggttgcagacagtttgttacccctgctgatgttgtcagtggaaaccccaaactcaacttagctttcgtggctaacctgtttaataaatacccagcactaactaagccagagaaccaggatattgactggactctattagaaggagaaactcgtgaagaaagaaccttccgtaactggatgaactctcttggtgtcaatcctcacgtaaaccatctctatgctgacctgcaagatgccctggtaatcttacagttatatgaacgaattaaagttcctgttgactggagtaaggttaataaacctccatacccgaaactgggagccaacatgaaaaagctagaaaactgcaactatgctgttgaattagggaagcatcctgctaaattctccctggttggcattggagggcaagacctgaatgatgggaaccaaaccctgactttagctttagtctggcagctgatgagaagatataccctcaatgtcctggaagatcttggagatggtcagaaagccaatgacgacatcattgtgaactgggtgaacagaacgttgagtgaagctggaaaatcaacttccattcagagttttaaggacaagacgatcagctccagtttggcagttgtggatttaattgatgccatccagccaggctgtataaactatgaccttgtgaagagtggcaatctaacagaagatgacaagcacaataatgccaagtatgcagtgtcaatggctagaagaatcggagccagagtgtatgctctccctgaagaccttgtggaagtaaagcccaagatggtcatgactgtgtttgcatgtttgatgggcaggggaatgaagagagtgtaaaataaccaatctgaataaaacagccatgctcccaggtgcatgattcgcaggtcagctatttccaggtgaagtgcttatggcttaaggaactcttggccattcaaaggacttttcattttgattaacaggactagcttatcatgagagccctcaggggaaagggtttaagaaaaacaactcctctttcccatagtcagagttgaatttgtcaggcacgcctgaaatgtgctcatagccaaaacattttactctctcctcctagaatgctgcccttgacatttcccattgctgtatgttatttcttgctctgttatcttttgccctcttagaatgtccctctcttgggacttgcttagatgatgggatatgaatattattagacagtaattttgctttccatccagtatgctagttcttattcgagaactatggtcagagcgtatttggatatgagtatcctttgcttatctttgtagtactgaaaatttgccgaagtaactggctgtgcagaatgtaatagaagcttttcttattcttttattcttaagatcagtatctttttacagtattctttctacatgatccttttttgtacatttaagaatattttgattatattaaacaagactgctgattttgctactttttttaaggggtcttcaagtaagtaaaacatacatcgtagctagaagaaaaatgtaccttaaatttgcatcttccctctcatacccaagctgtaaacaattgaaatattttgtcttaaatcacttggttcaatacatgcttatttgttttaaaacctgtatcatcaaactctctctctaaatttaaaatgctgttgaatatgatacttttgaggagagagtgtgctcagaacttagacgggatttggtaggccaagtatgctaagtgtacaatatattttttaattttacacctgaaacaaagaaatgtggtcactaaaaataaaagtatatatgtaggaattaatgtactcttgctttgtcaagctgtttgctatagtttccaaggtattatgttactctaactctgaaaagtgatgtaatctggtagcaatgtagtagttcaaataaaggcatttacataat

SEQ ID NO: 143 - DNA, 1880 bp, Homo sapiens
atgcaacaggacggacttggagtagggacaaggaacggaagtgggaaggggaggagcgtgcacccctcctggccttggtgcgcgccgcgccccctaaggtactttggaagggacgcgcgggccagacgcgcccagacggccgcgatggcgctggccatccaggtgaccgtgtccaacccctaccacgtggtgatcctcttccagcctgtgaccctgccctgtacctaccagatgacctcgacccccacgcaacccatcgtcatctggaagtacaagtctttctgccgggaccgcatcgccgatgccttctccccggccagcgtcgacaaccagctcaatgcccagctggcagccgggaacccaggctacaacccctacgttgagtgccaggacagcgtgcgcaccgtcagggtcgtggccaccaagcagggcaacgctgtgaccctgggagattactaccagggccggaggattaccatcaccggaaatgctgacctgacctttgaccagacggcgtggggggacagtggtgtgtattactgctccgtggtctcagcccaggacctccaggggaacaatgaggcctacgcagagctcatcgtccttgggaggacctcaggggtggctgagctcttacctggttttcaggcggggcccatagaagactggctcttcgtggttgtggtatgcctggctgccttcctcatcttcctcctcctgggcatctgctggtgccagtgctgcccgcacacttgctgctgctacgtcaggtgcccctgctgcccagacaagtgctgctgccccgaggccctgtatgccgccggcaaagcagccacctcaggtgttcccagcatttatgcccccagcacctatgcccacctgtctcccgccaagaccccacccccaccagctatgattcccatgggccctgcctacaacgggtaccctggaggataccctggagacgttgacaggagtagctcagtccgcagtggctacaggattcaggccagccagcaggacgactccatgcgggtcctgtactacatggagaaggagctggccaacttcgacccttctcgacctggcccccccagtggccgtgtggagcgggccatgagtgaagtcacctccctccacgaggacgactggcgatctcggccttcccggggccctgccctcaccccgatccgggatgaggagtggggtggccactccccccggagtcccaggggatgggaccaggagcccgccagggagcaggcaggcgggggctggcgggccaggcggccccgggcccgctccgtggacgccctggacgacctcaccccgccgagcaccgccgagtcagggagcaggtctcccacgagtaatggtgggagaagccgggcctacatgcccccgcggagccgcagccgggacgacctctatgaccaagacgactcgagggacttcccacgctcccgggacccccactacgacgacttcaggtctcgggagcgccctcctgccgaccccaggtcccaccaccaccgtacccgggaccctcgggacaacggctccaggtccggggacctcccctatgatgggcggctactggaggaggctgtgaggaagaaggggtcggaggagaggaggagaccccacaaggaggaggaggaagaggcctactacccgcccgcgccgcccccgtactcggagaccgactcgcaggcgtcccgagagcgcaggctcaagaagaacttggccctgagtcgggaaagtttagtcgtctgatctgacgttttctacgtagcttttgtatttttttttttaatttgaaggaacactgatgaagccctgccatacccctcccgagtctaataaaacgtataatcaca

SEQ ID NO: 144 - DNA, 4551 bp, Homo sapiens
atggctccctacccctgtggctgccacatcctgctgctgctcttctgctgcctggcggctgcccgggccaacctgctgaacctgaactggctttggttcaataatgaggacaccagccacgcagctaccacgatccctgagccccaggggcccctgcctgtgcagcccacagcagataccaccacacacgtgaccccccggaatggttccacagagccagcgacagcccctggcagccctgagccaccctcagagctgctggaagatggccaggacacccccacttctgccgagagcccggacgcgccagaggagaacattgccggtgtcggagccgagatcctgaacgtggccaaaggcatccggagcttcgtccagctgtggaatgacactgtccccactgagagcttggccagggcggaaaccctggtcctggagactcctgtgggcccccttgccctcgctgggccttccagcaccccccaggagaatgggaccactctctggcccagccgtggcattcctagctctccgggcgcccacacaaccgaggctggcaccttgcctgcacccaccccatcgcctccgtccctgggcaggccctgggcaccactcacggggccctcagtgccaccaccatcttcagagcgcatcagcgaggaggtggggctgctgcagctccttggggaccccccgccccagcaggtcacccagacggatgaccccgacgtcgggctggcctacgtctttgggccagatgccaacagtggccaagtggcccggtaccacttccccagcctcttcttccgtgacttctcactgctgttccacatccggccagccacagagggcccaggggtgctgttcgccatcacggactcggcgcaggccatggtcttgctgggcgtgaagctctctggggtgcaggacgggcaccaggacatctccctgctctacacagaacctggtgcaggccagacccacacagccgccagcttccggctccccgccttcgtcggccagtggacacacttagccctcagtgtggcaggtggctttgtggccctctacgtggactgtgaggagttccagagaatgccgcttgctcggtcctcacggggcctggagctggagcctggcgccgggctcttcgtggctcaggcggggggagcggaccctgacaagttccagggggtgatcgctgagctgaaggtgcgcagggacccccaggtgagccccatgcactgcctggacgaggaaggcgatgactcagatggggcattcggagactctggcagcgggctcggggacgcccgggagcttctcagggaggagacgggcgcggccctaaaacccaggctccccgcgccaccccccgtcaccacgccacccttggctggaggcagcagcacggaagattccagaagtgaagaagtcgaggagcagaccacggtggcttcgttaggagctcagacacttcctggctcagattctgtctccacgtgggacgggagtgtccggacccctgggggccgcgtgaaagagggcggcctgaaggggcagaaaggggagccaggtgttccgggcccacctggccgggcaggccccccaggatccccatgcctacctggtcccccgggtctcccgtgcccagtgagtcccctgggtcctgcaggcccagcgttgcaaactgtccccggaccacaaggacccccagggcctccggggagggacggcacccctggaagggacggcgagccgggcgaccccggtgaagacggaaagccgggcgacaccgggccacaaggcttccctgggactccaggggatgtaggtcccaagggagacaagggagaccctggggttggagagagagggcccccaggaccccaagggcctccagggcccccaggaccctccttcagacacgacaagctgaccttcattgacatggagggatctggctttgggggcgatctggaggccctgcggggtcctcgaggcttccctggacctcccggaccccccggtgtcccaggcctgcccggcgagccaggccgctttggggtgaacagctccgacgtcccaggacccgccggccttcctggtgtgcctgggcgcgagggtccccccgggtttcctggcctcccgggacccccaggccctccgggaagagaggggcccccaggaaggactgggcagaaaggcagcctgggtgaagcaggcgccccaggacataaggggagcaagggagcccccggtcctgctggtgctcgtggggagagcggcctggcaggagcccccggacctgctggaccaccaggcccccctgggccccctgggcccccaggaccaggactccccgctggatttgatgacatggaaggctccggggggcccttctggtcaacagcccgaagcgctgatgggccacagggacctcccggcctgccgggacttaagggggatcctggcgtgcctgggctgccgggggcgaagggagaagttggagcagatggaatccccgggttccccggcctccctggcagagagggcattgctgggccccaggggccaaagggagacagaggcagccggggagaaaagggagatccagggaaggacggagtcgggcagccgggcctccctggcccccccggacccccgggacctgtggtctacgtgtcggagcaggacggatccgtcctgagcgtgccgggacctgagggccggccgggtttcgcaggctttcccggacctgcaggacccaagggcaacctgggctctaagggcgaacgaggctccccgggacccaagggtgagaagggtgaaccgggcagcatcttcagccccgacggcggtgccctgggccctgcccagaaaggagccaagggagagccgggcttccgaggacccccgggtccatacggacggccggggtacaagggagagattggctttcctggacggccgggtcgccccgggatgaacggattgaaaggagagaaaggggagccgggagatgccagccttggatttggcatgaggggaatgcccggccccccaggacctccagggcccccaggccctccagggactcctgtttacgacagcaatgtgtttgctgagtccagccgccccgggcctccaggattgccagggaatcagggccctccaggacccaagggcgccaaaggagaagtgggcccccccggaccaccagggcagtttccgtttgactttcttcagttggaggctgaaatgaagggggagaagggagaccgaggtgatgcaggacagaaaggcgaaaggggggagcccgggggcggcggtttcttcggctccagcctgcccggcccccccggccccccaggcccacgtggctaccctgggattccaggtcccaagggagagagcatccggggccagcccggcccacctggacctcagggaccccccggcatcggctacgaggggcgccagggccctcccggccccccaggccccccagggcccccttcatttcctggccctcacaggcagactatcagcgttcccggccctccgggcccccctgggccccctgggccccctggaaccatgggcgcctcctcaggggtgaggctctgggctacacgccaggccatgctgggccaggtgcacgaggttcccgagggctggctcatcttcgtggccgagcaggaggagctctacgtccgcgtgcagaacgggttccggaaggtccagctggaggcccggacaccactcccacgagggacggacaatgaagtggccgccttgcagccccccgtggtgcagctgcacgacagcaacccctacccgcggcgggagcacccccaccccaccgcgcggccctggcgggcagatgacatcctggccagcccccctcgcctgcccgagccccagccctaccccggagccccgcaccacagctcctacgtgcacctgcggccggcgcgacccacaagcccacccgcccacagccaccgcgacttccagccggtgctccacctggttgcgctcaacagccccctgtcaggcggcatgcggggcatccgcggggccgacttccagtgcttccagcaggcgcgggccgtggggctggcgggcaccttccgcgccttcctgtcctcgcgcctgcaggacctgtacagcatcgtgcgccgtgccgaccgcgcagccgtgcccatcgtcaacctcaaggacgagctgctgtttcccagctgggaggctctgttctcaggctctgagggtccgctgaagcccggggcacgcatcttctcctttgacggcaaggacgtcctgaggcaccccacctggccccagaagagcgtgtggcatggctcggaccccaacgggcgcaggctgaccgagagctactgtgagacgtggcggacggaggctccctcggccacgggccaggcctcctcgctgctggggggcaggctcctggggcagagtgccgcgagctgccatcacgcctacatcgtgctctgcattgagaacagcttcatgactgcctccaagtag

SEQ ID NO: 145 - DNA, 1172 bp, Homo sapiens
agaaagccgcgcacctcctcccgccaggcgctttctcggacgccttgcccagcgggccgcccgaccccctgcaccatggaccccgctcgccccctggggctgtcgattctgctgcttttcctgacggaggctgcactgggcgatgctgctcaggagccaacaggaaataacgcggagatctgtctcctgcccctagactacggaccctgccgggccctacttctccgttactactacgacaggtacacgcagagctgccgccagttcctgtacgggggctgcgagggcaacgccaacaatttctacacctgggaggcttgcgacgatgcttgctggaggatagaaaaagttcccaaagtttgccggctgcaagtgagtgtggacgaccagtgtgaggggtccacagaaaagtatttctttaatctaagttccatgacatgtgaaaaattcttttccggtgggtgtcaccggaaccggattgagaacaggtttccagatgaagctacttgtatgggcttctgcgcaccaaagaaaattccatcattttgctacagtccaaaagatgagggactgtgctctgccaatgtgactcgctattattttaatccaagatacagaacctgtgatgctttcacctatactggctgtggagggaatgacaataactttgttagcagggaggattgcaaacgtgcatgtgcaaaagctttgaaaaagaaaaagaagatgccaaagcttcgctttgccagtagaatccggaaaattcggaagaagcaattttaaacattcttaatatgtcatcttgtttgtctttatggcttatttgcctttatggttgtatctgaagaataatatgacagcatgaggaaacaaatcattggtgatttattcaccagtttttattaatacaagtcactttttcaaaaatttggatttttttatatataactagctgctattcaaatgtgagtctaccatttttaatttatggttcaactgtttgtgagactgaattcttgcaatgcataagatataaaagcaaatatgactcactcatttcttggggtcgtattcctgatttcagaagaggatcataactgaaacaacataagacaatataatcatgtgcttttaacatatttgagaataaaaaggactagcaaataaaacac

SEQ ID NO: 146 - DNA, 1188 bp, Homo sapiens
tcgagatccattgtgctctaaaggctcgccctcctgtgcatcgcggctaatttggggtatcactgagctgaagacaaagagaagggggagaaaacctagcagaccaccatgtgctatgggaagtgtgcacgatgcatcggacattctctggtggggctcgccctcctgtgcatcgcggctaatattttgctttactttcccaatggggaaacaaagtatgcctccgaaaaccacctcagccgcttcgtgtggttcttttctggcatcgtaggaggtggcctgctgatgctcctgccagcatttgtcttcattgggctggaacaggatgactgctgtggctgctgtggccatgaaaactgtggcaaacgatgtgcgatgctttcttctgtattggctgctctcattggaattgcaggatctggctactgtgtcattgtggcagcccttggcttagcagaaggaccactatgtcttgattccctcggccagtggaactacacctttgccagcaccgagggccagtaccttctggatacctccacatggtccgagtgcactgaacccaagcacattgtggaatggaatgtatctctgttttctatcctcttggctcttggtggaattgaattcatcttgtgtcttattcaagtaataaatggagtgcttggaggcatatgtggcttttgctgctctcaccaacagcaatatgactgctaaaagaaccaacccaggacagagccacaatcttcctctatttcattgtaatttatatatttcacttgtattcatttgtaaaactttgtattagtgtaacatactccccacagtctacttttacaaacgcctgtaaagactggcatcttcacaggatgtcagtgtttaaatttagtaaacttcttttttgtttgtttatttgtgtaacatactccccacagtctacttttacaaacgcctgtaaagactggcatcttcacaggatgtcagtgtttaaatttagtaaacttcttttttgtttgtttatttgtttttgtttttttttaaggaatgaggaaacaaaccaccctctgggggtagtttacagactgagtgacagtactcagtatatctgagataaactctataatgttttggataaaaataacattccatggcacatatatacaatagtgattggctttagagcacaat

SEQ ID NO: 147 - DNA, 1889 bp, Homo sapiens
ccggcggctgttgtcgggcctccagcgggcggggccgttggcggagcagagcggaggcgcagccgggcggagggcccacgagggctcagccttcccggtcagcggtggtgacggtatcccagagtgccagagaaccgttgcttttccgagttgctcttcttccaggctccgttggtggtcggcatggcccgtggaaatcaacgagaacttgcccgccagaaaaacatgaagaaaacccaggaaattagcaagggaaagaggaaagaggatagcttgactgcctctcagagaaagcagagttctggaggccagaaatctgagagcaagatgtcagctgggccacacctccctctgaaggctccaagggagaatccttgctttcctcttccagctgctggtggctccaggtattacttggcttatggcagcataactcctatctctgcctttgtctttgtggtcttcttttctgtcttcttcccttctttttatgaggacttttgctgttggatttaggttccattctaacctaggatgatctcatttggaaatccttaatttcatctacaaaaactgttttcccaaataggtcacattcacgcatatcagatggacagatgtatcattttggggtccaccattcaacccactacaaggagttttttaaacaaaaataggaaacttagatgtaacttagcactttttttttttttttttgagatggagtctcactctgtcaccagactggagtgcagtggcgccatctcagctccatgcaacctctgcctcctgggttcaagcagttctcttgcctcagcctcctgggtagctgggattacaggcacgcgctgccacacccaggtaatttatttattttttttttgagacagagtctcgcactgttgcccaggctggactgcagtggcgtgatctctgctcactgcaacctccgcctcccgggttcaagcgattctccagcctcagcttcctgagtagatgggattacaggcgcctgccaccacgcccagctaatttttttgtattcttagtagagatggggtttcaccatgttggccaggctggtctccatctcctgacctcgtgattcacccgcctcggcctcccaaagtgctgggattacaggcgtgagtcacagcccccggccataatttagcactttaaaaaataatagccatgttgggccaggcgtggtggctcatgcctgtaatctgagcactttgggagaccaaggcgggtagatcccttgtgcccaggagttcaagaccagcctgggcaacatggcgaaaccccatttctactaaaaatacaaaaattagctggggcgaggggataggccgagttccgggtgtaagggggccattagggagagcagagcgaggcagctgatcttccggattgggggccttgcccggaagctggacctcacggagatgaaacggaagatgcacgaggatatgatctccatacagaactttctcatctacgtggccctgctgcgagtcactccatttatcttaaagaaattggacagcatatgaagattggacatcacatgtgaatgcatgatatgaagagcctggttacagtttctactgttctctgcaagtaaataggcccagaaaggtataagagactctttgaatggacataaaaattctgcttgttaagaacaagttgagctctggtaactgatcttaatagctaaaatataaaaatatttgggaagtctgaaatgaggtctcctggccctggtgtgcccttaatgcctgtgacagttggcctctgtgaatattggtataattgtaaataatgtcaaactccattttctagcaagtattaataattaagggaagtatgtctgaaatggc

SEQ ID NO: 148 - DNA, 1892 bp, Homo sapiens
ccggcggctgttgtcgggcctccagcgggcggggccgttggcggagcagagcggaggcgcagccgggcggagggcccacgagggctcagccttcccggtcagcggtggtgacggtatcccagagtgccagagaaccgttgcttttccgagttgctcttcttccaggctccgttggtggtcggcatggcccgtggaaatcaacgagaacttgcccgccagaaaaacatgaagaaaacccaggaaattagcaagggaaagaggaaagaggatagcttgactgcctctcagagaaagcagagttctggaggccagaaatctgagagcaagatgtcagctgggccacacctccctctgaaggctccaagggagaatccttgctttcctcttccagctgctggtggctccaggttattacttggcttatggcagcataactcctatctctgcctttgtctttgtggtcttcttttctgtcttcttcccttctttttatgaggacttttgctgttggatttaggttccattctaacctaggatgatctcatttggaaatccttaatttcatctacaaaaactgttttcccaaataggtcacattcacgcatatcagatggacagatgtatcattttggggtccaccattcaacccactacaaggagttttttaaacaaaaataggaaacttagatgtaacttagcactttttttttttttttttgagatggagtctcactctgtcaccagactggagtgcagtggtgccatctcagctccatgcaacctctgcctcctgggttcaagcagttctcttgcctcagcctcctgggtagctgggattacaggcacgcgctgccacacccaggtaatttatttattttttttttgagacagagtctcgcactgttgcccaggctggactgcagtggcgtgatctctgctcactgcaacctccgcctcccgggttcaagcgattctccagcctcagcttcctgagtagatgggattacaggcgcctgccaccacgcccagctaattttttgtattcttagtagagatggggtgttcaccatgttggccaggctggtctccatctcctgacctcgtgattcacccgcctcggcctcccaaagtgctgggattacaggcgtgagtcacagcccccggccataatttagcactttaaaaaataatagccatgttgggccaggcgtggtggctcatgcctgtaatctgagcactttgggagaccaaggcgggtagatcccttgtgcccaggagttcaagaccagcctgggcaacatggcgaacaccccatttctactaaaaatacaaaaattagctggggcgaggggataggccgagttccgggtgtaagggggccattagggagagcagagcgaggcagctgatcttccggattgggggccttgcccggaagctggacctcacggagatgaaacggaagatgcacgaggatatgatctccatacagaactttctcatctacgtggccctgctgcgagtcactccatttatcttaaagaaattggacagcatatgaagattggacatcacatgtgaatgcatgatatgaagagcctggttacagtttctactgttctctgcaagtaaataggcccagaaaggtataagagactctttgaatggacataaaaattctgcttgttaagaacaagttgagctctggtaactgatcttaatagctaaaatataaaaatatttgggaagtctgaaatgaggtctcctggccctggtgtgcccttaatgcctgtgacagttggcctctgtgaatattggtataattgtaaataatgtcaaactccattttctagcaagtattaataattaagggaagtatgtctgaaatggca

SEQ ID NO: 149 - DNA, 5784 bp, Homo sapiens
acggcatccagtacagaggggctggacttggacccctgcagcagccctgcacaggagaagcggcatataaagccgcgctgcccgggagccgctcggccacgtccaccggagcatcctgcactgcagggccggtctctcgctccagcagagcctgcgcctttctgactcggtccggaacactgaaaccagtcatcactgcatctttttggcaaaccaggagctcagctgcaggaggcaggatggtctggaggctggtcctgctggctctgtgggtgtggcccagcacgcaagctggtcaccaggacaaagacacgaccttcgaccttttcagtatcagcaacatcaaccgcaagaccattggcgccaagcagttccgcgggcccgaccccggcgtgccggcttaccgcttcgtgcgctttgactacatcccaccggtgaacgcagatgacctcagcaagatcaccaagatcatgcggcagaaggagggcttcttcctcacggcccagctcaagcaggacggcaagtccaggggcacgctgttggctctggagggccccggtctctcccagaggcagttcgagatcgtctccaacggccccgcggacacgctggatctcacctactggattgacggcacccggcatgtggtctccctggaggacgtcggcctggctgactcgcagtggaagaacgtcaccgtgcaggtggctggcgagacctacagcttgcacgtgggctgcgacctcataggaccagttgctctggacgagcccttctacgagcacctgcaggcggaaaagagccggatgtacgtggccaaaggctctgccagagagagtcacttcaggggtttgcttcagaacgtccacctagtgtttgaaaactctgtggaagatattctaagcaagaagggttgccagcaaggccagggagctgagatcaacgccatcagtgagaacacagagacgctgcgcctgggtccgcatgtcaccaccgagtacgtgggccccagctcggagaggaggcccgaggtgtgcgaacgctcgtgcgaggagctgggaaacatggtccaggagctctcggggctccacgtcctcgtgaaccagctcagcgagaacctcaagagagtgtcgaatgataaccagtttctctgggagctcattggtggccctcctaagacaaggaacatgtcagcttgctggcaggatggccggttctttgcggaaaatgaaacgtgggtggtggacagctgcaccacgtgtacctgcaagaaatttaaaaccatttgccaccaaatcacctgcccgcctgcaacctgcgccagtccatcctttgtggaaggcgaatgctgcccttcctgcctccactcggtggacggtgaggagggctggtctccgtgggcagagtggacccagtgctccgtgacgtgtggctctgggacccagcagagaggccggtcctgtgacgtcaccagcaacacctgcttggggccctcgatccagacacgggcttgcagtctgagcaagtgtgacacccgcatccggcaggacggcggctggagccactggtcaccttggtcttcatgctctgtgacctgtggagttggcaatatcacacgcatccgtctctgcaactccccagtgccccagatggggggcaagaattgcaaagggagtggccgggagaccaaagcctgccagggcgccccatgcccaatcgatggccgctggagcccctggtccccgtggtcggcctgcactgtcacctgtgccggtgggatccgggagcgcacccgggtctgcaacagccctgagcctcagtacggagggaaggcctgcgtgggggatgtgcaggagcgtcagatgtgcaacaagaggagctgccccgtggatggctgtttatccaacccctgcttcccgggagcccagtgcagcagcttccccgatgggtcctggtcatgcggcttctgccctgtgggcttcttgggcaatggcacccactgtgaggacctggacgagtgtgccctggtccccgacatctgcttctccaccagcaaggtgcctcgctgtgtcaacactcagcctggcttccactgcctgccctgcccgccccgatacagagggaaccagcccgtcggggtcggcctggaagcagccaagacggaaaagcaagtgtgtgagcccgaaaacccatgcaaggacaagacacacaactgccacaagcacgcggagtgcatctacctgggtcacttcagcgaccccatgtacaagtgcgagtgccagacaggctacgcgggcgacgggctcatctgcggggaggactcggacctggacggctggcccaacctcaatctggtctgcgccaccaacgccacctaccactgcatcaaggataactgcccccatctgccaaattctgggcaggaagactttgacaaggacgggattggcgatgcctgtgatgatgacgatgacaatgacggtgtgaccgatgagaaggacaactgccagctcctcttcaatccccgccaggctgactatgacaaggatgaggttggggaccgctgtgacaactgcccttacgtgcacaaccctgcccagatcgacacagacaacaatggagagggtgacgcctgctccgtggacattgatggggacgatgtcttcaatgaacgagacaattgtccctacgtctacaacactgaccagagggacacggatggtgacggtgtgggggatcactgtgacaactgccccctggtgcacaaccctgaccagaccgacgtggacaatgaccttgttggggaccagtgtgacaacaacgaggacatagatgacgacggccaccagaacaaccaggacaactgcccctacatctccaacgccaaccaggctgaccatgacagagacggccagggcgacgcctgtgaccctgatgatgacaacgatggcgtccccgatgacagggacaactgccggcttgtgttcaacccagaccaggaggacttggacggtgatggacggggtgatatttgtaaagatgattttgacaatgacaacatcccagatattgatgatgtgtgtcctgaaaacaatgccatcagtgagacagacttcaggaacttccagatggtccccttggatcccaaagggaccacccaaattgatcccaactgggtcattcgccatcaaggcaaggagctggttcagacagccaactcggaccccggcatcgctgtaggttttgacgagtttgggtctgtggacttcagtggcacattctacgtaaacactgaccgggacgacgactatgctggcttcgtctttggttaccagtcaagcagccgcttctatgtggtgatgtggaagcaggtgacgcagacctactgggaggaccagcccacgcgggcctatggctactccggcgtgtccctcaaggtggtgaactccaccacggggacgggcgagcacctgaggaacgcgctgtggcacacggggaacacgccggggcaggtgcgaaccttatggcacgaccccaggaacattggctggaaggactacacggcctataggtggcacctgactcacaggcccaagaccggctacatcagagtcttagtgcatgaaggaaaacaggtcatggcagactcaggacctatctatgaccaaacctacgctggcgggcggctgggtctatttgtcttctctcaagaaatggtctatttctcagacctcaagtacgaatgcagagatatttaaacaagatttgctgcatttccggcaatgccctgtgcatgccatggtccctagacacctcagttcattgtggtccttgcggcttctctctctagcagcacctcctgtcccttgaccttaactctgatggttcttcacctcctgccagcaaccccaaacccaagtgccttcagaggataaatatcaatggaactcagagatgaacatctaacccactagaggaaaccagtttggtgatatatgagactttatgtggagtgaaaattgggcatgccattacattgctttttcttgtttgtttaaaaagaatgacgtttacatataaaatgtaattacttattgtatttatgtgtatatggagttgaagggaatactgtgcataagccattatgataaattaagcatgaaaaatattgctgaactacttttggtgcttaaagttgtcactattcttgaattagagttgctctacaatgacacacaaatcccgctaaataaattataaacaagggtcaattcaaatttgaagtaatgttttagtaaggagagattagaagacaacaggcatagcaaatgacataagctaccgattaactaatcggaacatgtaaaacagttacaaaaataaacgaactctcctcttgtcctacaatgaaagccctcatgtgcagtagagatgcagtttcatcaaagaacaaacatccttgcaaatgggtgtgacgcggttccagatgtggatttggcaaaacctcatttaagtaaaaggttagcagagcaaagtgcggtgctttagctgctgcttgtgccgttgtggcgtcggggaggctcctgcctgagcttccttccccagctttgctgcctgagaggaaccagagcagacgcacaggccggaaaaggcgcatctaacgcgtatctaggctttggtaactgcggacaagttgcttttacctgatttgatgatacatttcattaaggttccagttataaatattttgttaatatttattaagtgactatagaatgcaactccatttaccagtaacttattttaaatatgcctagtaacacatatgtagtataatttctagaaacaaacatctaataagtatataatcctgtgaaaatatgaggcttgataatattaggttgtcacgatgaagcatgctagaagctgtaacagaatacatagagaataatgaggagtttatgatggaaccttaatatataatgttgccagcgattttagttcaatatttgttactgttatctatctgctgtatatggaattcttttaattcaaacgctgaaaacgaatcagcatttagtcttgccaggcacacccaataatcagtcatgtgtaatatgcacaagtttgtttttgtttttgttttttttgttggttggtttttttgctttaagttgcatgatctttctgcaggaaatagtcactcatcccactccacataaggggtttagtaagagaagtctgtctgtctgatgatggatagggggcaaatctttttcccctttctgttaatagtcatcacatttctatgccaaacaggaacgatccataactttagtcttaatgtacacattgcattttgataaaattaattttgttgtttcctttgaggttgatcgttgtgttgttttgctgcactttttacttttttgcgtgtggagctgtattcccgagacaacgaagcgttgggatacttcattaaatgtagcgactgtcaacagcgtgcaggttttctgtttctgtgttgtggggtcaaccgtacaatggtgtgggaatgacgatgatgtgaatatttagaatgtaccatattttttgtaaattatttatgtttttctaaacaaatttatcgtataggttgatgaaacgtcatgtgttttgccaaagactgtaaatatttatttatgtgttcacatggtcaaaatttcaccactgaaaccctgcacttagctagaacctcatttttaaagattaacaacaggaaataaattgtaaaaaaggttttct

SEQ ID NO: 150 - DNA, 5177 bp, Homo sapiens
ggactgcgaaaggagcagggttgcggagctagggctccagcctgcggccgcgcattcttgcgtctggccagccgcgagctctaagggtcggccccgcccggtccgcccccgcggctccctgccaggctctcgcgggcgcgctcggggtggggcctcgcggctggcggagatgcggccggggctgcgcggtggtgatgcgagcctgctgggcggcgcgccggggcagccggagccgcgcgccgcggcgctgtaatcggacaccaagagcgctcgcccccggcctccggccactttccattcactccgaggtgcttgattgagcgacgcggagaagagctccgggtgccgcggcactgcagcgctgagattcctttacaaagaaactcagaggaccgggaagaaagaatttcacctttgcgacgtgctagaaaataaggtcgtctgggaaaaggactggagacacaagcgcatccaaccccggtagcaaactgatgacttttccgtgctgatttctttcaacctcggtattttcccttggatattaacttgcatatctgaagaaatggcattccggacaatttgcgtgttggttggagtatttatttgttctatctgtgtgaaaggatcttcccagccccaagcaagagtttatttaacatttgatgaacttcgagaaaccaagacctctgaatacttcagcctttcccaccatcctttagactacaggattttattaatggatgaagatcaggaccggatatatgtgggaagcaaagatcacattctttccctgaatattaacaatataagtcaagaagctttgagtgttttctggccagcatctacaatcaaagttgaagaatgcaaaatggctggcaaagatcccacacacggctgtgggaactttgtccgtgtaattcagactttcaatcgcacacatttgtatgtctgtgggagtggcgctttcagtcctgtctgtacttacttgaacagagggaggagatcagaggaccaagttttcatgattgactccaagtgtgaatctggaaaaggacgctgctctttcaaccccaacgtgaacacggtgtctgttatgatcaatgaggagcttttctctggaatgtatatagatttcatggggacagatgctgctatttttcgaagtttaaccaagaggaatgcggtcagaactgatcaacataattccaaatggctaagtgaacctatgtttgtagatgcacatgtcatcccagatggtactgatccaaatgatgctaaggtgtacttcttcttcaaagaaaaactgactgacaataacaggagcacgaaacagattcattccatgattgctcgaatatgtcctaatgacactggtggactgcgtagccttgtcaacaagtggaccactttcttaaaggcgaggctggtgtgctcggtaacagatgaagacggcccagaaacacactttgatgaattagaggatgtgtttctgctggaaactgataacccgaggacaacactagtgtatggcatttttacaacatcaagctcagttttcaaaggatcagccgtgtgtgtgtatcatttatctgatatacagactgtgtttaatgggccttttgcccacaaagaagggcccaatcatcagctgatttcctatcagggcagaattccatatcctcgccctggaacttgtccaggaggagcatttacacccaatatgcgaaccaccaaggagttcccagatgatgttgtcacttttattcggaaccatcctctcatgtacaattccatctacccaatccacaaaaggcctttgattgttcgtattggcactgactacaagtacacaaagatagctgtggatcgagtgaacgctgctgatgggagataccatgtcctgtttctcggaacagatcggggtactgtgcaaaaagtggttgttcttcctactaacaactctgtcagtggcgagctcattctggaggagctggaagtctttaagaatcatgctcctataacaacaatgaaaatttcatctaaaaagcaacagttgtatgtgagttccaatgaaggggtttcccaagtatctctgcaccgctgccacatctatggtacagcctgtgctgactgctgcctggcgcgggacccttattgcgcctgggatggccattcctgttccagattctacccaactgggaaacggaggagccgaagacaagatgtgagacatggaaacccactgactcaatgcagaggatttaatctaaaagcatacagaaatgcagctgaaattgtgcagtatggagtaaaaaataacaccacttttctggagtgtgcccccaagtctccgcaggcatctatcaagtggctgttacagaaagacaaagacaggaggaaagaggttaagctgaatgaacgaataatagccacttcacagggactcctgatccgctctgttcagggttctgaccaaggactttatcactgcattgctacagaaaatagtttcaagcagaccatagccaagatcaacttcaaagttttagattcagaaatggtggctgttgtgacggacaaatggtccccgtggacctgggccagctctgtgagggctttacccttccacccgaaggacatcatgggggcattcagccactcagaaatgcagatgattaaccaatactgcaaagacactcggcagcaacatcagcagggagatgaatcacagaaaatgagaggggactatggcaagttaaaggccctcatcaatagtcggaaaagtagaaacaggaggaatcagttgccagagtcataatattttcttatgtgggtcttatgcttccattaacaaatgctctgtcttcaatgatcaaattttgagcaaagaaacttgtgctttaccaaggggaattactgaaaaaggtgattactcctgaagtgagttttacacgaactgaaatgagcatgcattttcttgtatgatagtgactagcactagacatgtcatggtcctcatggtgcatataaatatatttaacttaacccagattttatttatatctttattcaccttttcttcaaaatcgatatggtggctgcaaaactagaattgttgcatccctcaattgaatgagggccatatccctgtggtattcctttcctgctttggggctttagaattctaattgtcagtgattttgtatatgaaaacaagttccaaatccacagcttttacgtagtaaaagtcataaatgcatatgacagaatggctatcaaaagaaatagaaaaggaagacggcatttaaagttgtataaaaacacgagttattcataaagagaaaatgatgagtttttatggttccaatgaaatatcttcccctttttttaagattgtaaaaataatcagttactggtatctgtcactgacctttgtttccttattcaggaagataaaaatcagtaacctaccccatgaagatatttggtgggagttatatcagtgaagcagtttggtttatattcttatgttatcaccttccaaacaaaagcacttactttttttggaagttatttaatttattttagactcaaagaatataatcttgcactactcagttattactgtttgttctcttattccctagtctgtgtggcaaattaaacaatataagaaggaaaaatttgaagtattagacttctaaataaggggtgaaatcatcagaaagaaaaatcaaagtagaaactactaattttttaagaggaatttataacaaatatggctagttttcaacttcagtactcaaattcaatgattcttccttttattaaaaccagtctcagatatcatactgatttttaagtcaacactatatattttatgatcttttcagtgtgatggcaaggtgcttgttatgtctagaaagtaagaaaacaatatgaggagacattctgtctttcaaaaggtaatggtacatacgttcactggtctctaagtgtaaaagtagtaaattttgtgatgaataaaataattatctcctaattgtatgttagaataattttattagaataatttcatactgaaattattttctccaaataaaaattagatggaaaaatgtgaaaaaaattattcatgctctcatatatattttaaaaacactacttttgcttttttatttaccttttaagacattttcatgcttccaggtaaaaacagatattgtaccatgtacctaatccaaatatcatataaacattttatttatagttaataatctatgatgaaggtaattaaagtagattatggcctttttaagtattgcagtctaaaacttcaaaaactaaaatcattgtcaaaattaatatgattattaatcagaatatcagatatgattcactatttaaactatgataaattatgataatatatgaggaggcctcgctatagcaaaaatagttaaaatgctgacataacaccaaacttcattttttaaaaaatctgttgttccaaatgtgtataattttaaagtaatttctaaagcagtttattataatggtttgcctgcttaaaaggtataattaaacttcttttctcttctacattgacacacagaaatgtgtcaatgtaaagccaaaaccatcttctgtgtttatggccaatctattctcaaagttaaaagtaaaattgtttcagagtcacagttccctttatttcacataagcccaaactgatagacagtaacggtgtttagttttatactatatttgtgctatttaattctttctattttcacaattattaaattgtgtacactttcattacttttaaaaatgtagaaattcttcatgaacataactctgctgaatgtaaaagaaaattttttttcaaaaatgctgttaatgtatactactggtggttgattggttttattttatgtagcttgacaattcagtgacttaatatctattccatttgtattgtacataaaattttctagaaatacacttttttccaaagtgtaagtttgtgaatagattttagcatgatgaaactgtcataatggtgaatgttcaatctgtgtaagaaaacaaactaaatgtagttgtcacactaaaatttaattggatattgatgaaatcattggcctggcaaaataaaacatgttgaattcccc

SEQ ID NO: 151 - DNA, 2280 bp, Homo sapiens
tccagtgacggagccgcccggccgacagccccgagacgacagcccggcgcgtcccggtccccacctccgaccaccgccagcgctccaggccccgcgctccccgctcgccgccaccgcgccctccgctccgcccgcagtgccaaccatgaccgccgccagtatgggccccgtccgcgtcgccttcgtggtcctcctcgccctctgcagccggccggccgtcggccagaactgcagcgggccgtgccggtgcccggacgagccggcgccgcgctgcccggcgggcgtgagcctcgtgctggacggctgcggctgctgccgcgtctgcgccaagcagctgggcgagctgtgcaccgagcgcgacccctgcgacccgcacaagggcctcttctgtgacttcggctccccggccaaccgcaagatcggcgtgtgcaccgccaaagatggtgctccctgcatcttcggtggtacggtgtaccgcagcggagagtccttccagagcagctgcaagtaccagtgcacgtgcctggacggggcggtgggctgcatgcccctgtgcagcatggacgttcgtctgcccagccctgactgccccttcccgaggagggtcaagctgcccgggaaatgctgcgaggagtgggtgtgtgacgagcccaaggaccaaaccgtggttgggcctgccctcgcggcttaccgactggaagacacgtttggcccagacccaactatgattagagccaactgcctggtccagaccacagagtggagcgcctgttccaagacctgtgggatgggcatctccacccgggttaccaatgacaacgcctcctgcaggctagagaagcagagccgcctgtgcatggtcaggccttgcgaagctgacctggaagagaacattaagaagggcaaaaagtgcatccgtactcccaaaatctccaagcctatcaagtttgagctttctggctgcaccagcatgaagacataccgagctaaattctgtggagtatgtaccgacggccgatgctgcaccccccacagaaccaccaccctgccggtggagttcaagtgccctgacggcgaggtcatgaagaagaacatgatgttcatcaagacctgtgcctgccattacaactgtcccggagacaatgacatctttgaatcgctgtactacaggaagatgtacggagacatggcatgaagccagagagtgagagacattaactcattagactggaacttgaactgattcacatctcatttttccgtaaaaatgatttcagtagcacaagttatttaaatctgtttttctaactgggggaaaagattcccacccaattcaaaacattgtgccatgtcaaacaaatagtctatcttccccagacactggtttgaagaatgttaagacttgacagtggaactacattagtacacagcaccagaatgtatattaaggtgtggctttaggagcagtgggagggtaccagcagaaaggttagtatcatcagatagctcttatacgagtaatatgcctgctatttgaagtgtaattgagaaggaaaattttagcgtgctcactgacctgcctgtagccccagtgacagctaggatgtgcattctccagccatcaagagactgagtcaagttgttccttaagtcagaacagcagactcagctctgacattctgattcgaatgacactgttcaggaatcggaatcctgtcgattagactggacagcttgtggcaagtgaatttcctgtaacaagccagattttttaaaatttatattgtaaatattgtgtgtgtgtgtgtgtgtgtatatatatatatatatgtacagttatctaagttaatttaaagttgtttgtgcctttttatttttgtttttaatgctttgatatttcaatgttagcctcaatttctgaacaccataggtagaatgtaaagcttgtctgatcgttcaaagcatgaaatggatacttatatggaaattctctcagatagaatgacagtccgtcaaaacagattgtttgcaaaggggaggcatcagtgtccttggcaggctgatttctaggtaggaaatgtggtagctcacgctcacttttaatgaacaaatggcctttattaaaaactgagtgactctatatagctgatcagttttttcacctggaagcatttgtttctactttgatatgactgtttttcggacagtttatttgttgagagtgtgaccaaaagttacatgtttgcacctttctagttgaaaataaagtatattttttct

SEQ ID NO: 152 - DNA, 1941 bp, Homo sapiens
aagaccctcatcaatagatggagacatacagaaatagtcaaaccacatctaccaaatgccagtatcaggcggcggcttcgaagccaaagtgatgtttggatgtaaagtgaaatattagttggcggatgaagcagatagtgaggaaagttgagccaataatgacgtgaagtccgtggaagcctgtggctacaaaaaatgttgagccgtagatgccgtcggaaatggtgaagggagactcgaagtactctgaggcttgtaggagggtaaaatagagacccagtaaaattgtaataagcagtgcttgaattatttggtttcggttgttttctattagactatggtgagctcaggtgattgatactcctgatgcgagtaatacggatgtgtttaggagtgggacttctaggggatttagcggggtgatgcctgttgggggccagtgccctcctagttggggggtaggggctaggctggagtggtaaaaggctcagaaaaatcctgcgaagaaaaaaacttctgaggtaataaataggattatcccatatcgaaggcctttttggacaggtggtgtgtggtggccttggtatgtgctttctcgtgttacatcgcgccatcattggtatatggttagtgtgttggttagtaggcctagtatgaggagcgttatggagtggaagtgaaatcacatggctaggccggaggtcattaggagggctgagagggcccctgttaggggtcatgggctgggttttactatatgataggcatgtgatttcctgcgcctcgcaagactccagcgccttctctccgtcctcggattctctgctctcctcgacggagtcctccccgcaggcagccccgagcccctggtgctccatgaggagacaccgcccaccaccagcagcgactctgaggaggaacaagaagatgaggaagaaatcgatgttgtttctgtggaaaagaggcaggctcctggcaaaaggtcagagtctggatcaccttctgctggaggccacagcaaacctcctcacagcccactggtcctcaagaggtgccacgtctccacacatcagcacaactacgcagcgcctccctccactcggaaggactatcctgctgccaagagggtcaagttggacagtgtcagagtcctgagacagatcagcaacaaccgaaaatgcaccagccccaggtcctcggacaccgaggagaatgtcaagaggcgaacacacaacgtcttggagcgccagaggaggaacgagctaaaacggagcttttttgccctgcgtgaccagatcccggagttggaaaacaatgaaaaggcccccaaggtagttatccttaaaaaagccacagcatacatcctgtccgtccaagcagaggagcaaaagctcatttctgaagaggacttgttgcggaaacgacgagaacagttgaaacacaaacttgaacagctacggaactcttgtgcgtaaggaaaagtaaggaaaacgattccttctaacagaaatgtcctgagcaatcgcctatgaacttgtttcaaatgcatgatcaaatgcaacctcacaaccttggctgagtcttgagactgaaagatttagccataatgtaaactgcctcaaattggactttgggcataaaagaacttttttatgcttaccatcttttttttttctttaacagatttgtatttaagaattgtttttaaaaaattttaagatttacacaatgtttctctgtaaatattgccattaaatgtaaataactttaataaaacgtttatagcagttacacagaatttcaatcctagtatatagtacctagtattataggtactataaaccctaattttttttatttaagtacattttgctttttaaagttgatttttttctattgtttttagaaaaaataaaataactggcaaatatatcattgagc

SEQ ID NO: 153 - protein, 193 aa, Homo sapiens
  VARIANT 143: Xaa = Any Amino Acid
MIRCGLACERCRWILPLLLLSAIAFDIIALAGRGWLQSSDHGQTSSLWWKCSQEGGGSGSYEEGCQSLMEYAWGRAAAAMLFCGFIILVICFILSFFALCGPQMLVFLRVIGGLLALAAVFQIISLVIYPVKYTQTFTLHANXAVTYIYNWAYGFGWAATIILIGCAFFFCCLPNYEDDLLGNAKPRYFYTSA

SEQ ID NO: 154 - protein, 402 aa, Homo sapiens [sequence omitted]

SEQ ID NO: 155 - protein, 430 aa, Homo sapiens
MSFTTRSTFSTNYRSLGSVQAPSYGARPVSSAASVYAGAGGSGSRISVSRSTSFRGGMGSGGLATGIAGGLAGMGGIQNEKETMQSLNDRLASYLDRVRSLETENRRLESKIREHLEKKGPQVRDWSHYFKIIEDLRAQIFANTVDNARIVLQIDNARLAADDFRVKYETELAMRQSVENDIHGLRKVIDDTNITRLQLETEIEALKEELLFMKKNHEEEVKGLQAQIASSGLTVEVDAPKSQDLAKIMADIRAQYDELARKNREELDKYWSQQIEESTTVVTTQSAEVGAAETTLTELRRTVQSLEIDLDSMRNLKASLENSLREVEARYALQMEQLNGILLHLESELAQTRAEGQRQAQEYEALLNIKVKLEAEIATYRRLLEDGEDFNLGDALDSSNSMQTIQKTTTRRIVDGKVVSETNDTKVLRH

SEQ ID NO: 156 - protein, 331 aa, Homo sapiens
MGTPQKDVIIKSDAPDTLLLEKHADYIASYGSKKDDYEYCMSEYLRMSGIYWGLTVMDLMGQLHRMNREEILAFIKSCQHECGGISASIGHDPHLLYTLSAVQILTLYDSINVIDVNKVVEYVKGLQKEDGSFAGDIWGEIDTRFSFCAVATLALLGKLDAINVEKAIEFVLSCMNFDGGFGCRPGSESHAGQIYCCTGFLAITSQLHQVNSDLLGWWLCERQLPSGGLNGRPEKLPDVCYSWWVLASLKIIGRLHWIDREKLRNFILACQDEETGGFADRPGDMVDPFHTLFGIAGLSLLGEEQIKPVNPVFCMPEEVLQRVNVQPELVS

SEQ ID NO: 157 - protein, 4590 aa, Homo sapiens
MGRHLALLLLLLLLFQHFGDSDGSQRLEQTPLQFTHLEYNVTVQENSAAKTYVGHPVKMGVYITHPAWEVRYKIVSGDSENLFKAEEYILGDFCFLRIRTKGGNTAILNREVKDHYTLIVKALEKNTNVEARTKVRVQVLDTNDLRPLFSPTSYSVSLPENTAIRTSIARVSATDADIGTNGEFYYSFKDRTDMFAIHPTSGVIVLTGRLDYLETKLYEMEILAADRGMKLYGSSGISSMAKLTVHIEQANECAPVITAVTLSPSELDRDPAYAIVTVDDCDQGANGDIASLSIVAGDLLQQFRTVRSFPGSKEYKVKAIGDIDWDSHPFGYNLTLQAKDKGTPPQFSSVKVIHVTSPQFKAGPVKFEKDVYRAEISEFAPPNTPVVMVKAIPAYSHLRYVFKRTPGKAKFSLNYNTGLISILEPVKRQQAAHFELEVTTSDRKASTKVLVKVLGANSNPPEFTQTAYKAAFDENVPIGTTIMSLSAVDPDEGENGYVTYSIANLNHVPFAIDHFTGAVSTSENLDYELMPRVYTLRIRASDWGLPYRREVEVLATITLNNLNDNTPLFEKINCEGTIPRDLGVGEQITTVSAIDADELQLVQYQIEAGNELDLFSLNPNSGVLSLKRSLMDGLGAKVSFHSLRITATDGENFATPLYINITVAASHKLVNLQCEETGVAKMLAEKLLQANKLHNQGEVEDIFFDSHSVNAHIPQFRSTLPTGIQVKENQPVGSSVIFMNSTDLDTGFNGKLVYAVSGGNEDSCFMIDMETGMLKILSPLDRETTDKYTLNITVYDLGIPQKAAWRLLHVVVVDANDNPPEFLQESYFVEVSEDKEVHSEIIQVEATDKDLGPNGHVTYSILTDTDTFSIDSVTGVVNIARPLDRELQHEHSLKIEARDQAREEPQLFSTVVVKVSLEDVNDNPPTFIPPNYRVKVREDLPEGTVIMWLEAHDPDLGQSGQVRYSLLDHGEGNFDVDKLSGAVRIVQQLDFEKKQVYNLTVRAKDKGKPVSLSSTCYVEVEVVDVNENLHPPVFSSFVEKGTVKEDAPVGSLVMTVSAHDEDAGRDGEIRYSIRDGSGVGVFKIGEETGVIETSDRLDRESTSHYWLTVFATDQGVVPLSSFIEIYIEVEDVNDNAPQTSEPVYYPEIMENSPKDVSVVQIEAFDPDSSSNDKLMYKITSGNPQGFFSIHPKTGLITTTSRKLDREQQDEHILEVTVTDNGSPPKSTIARVIVKILDENDNKPQFLQKFYKIRLPEREKPDRERNARREPLYRVIATDKDEGPNAEISYSIEDGNEHGKFFIEPKTGVVSSKRFSAAGEYDILSIKAVDNGRPQKSSTTRLHIEWISKPKQSLEPISFEESFFTFTVMESDPVAHMIGVISVEPPGIPLWFDITGGNYDSHFDVDKGTGTIIVAKPLDAEQKSNYNLTVEATDGTTTILTQVFIKVIDTNDHRPQFSTSKYEVVIPEDTAPETEILQISAVDQDEKNKLIYTLQSSRDPLSLKKFRLDPATGSLYTSEKLDHEAVSPAHLTVMVRDQDVPVKRNFARIVVNVSDTNDHAPWFTASSYKGRVYESAAVGSVVLQVTALDKDKGKNAEVLYSIESGNIGNIGNSFMIDPVLGSIKTAKELDRSNQAEYDLMVKATDKGSPPMSEITSVRIFVTIADNASPKFTSKEYSVELSETVSIGSFVGMVTAHSQSSVVYEIKDGNTGDAFDINPHSGTIITQKALDFETLPIYTLIIQGTNMAGLSTNTTVLVHLQDENDNAPVFMQAEYTGLISESASINSVVLTDRNVPLVIRAADADKDSNALLVYHIVEPSVHTYFAIDSSTGAIHTVLSLDYEETSIFHFTVQVHDMGTPRLFAEYAANVTVHVIDINDCPPVFAKPLYEASLLLPTYKGVKVITVNATDADSSAFSQLIYSITEGNIGEKFSMDYKTGALTVQNTTQLRSRYELTVRASDGRFAGLTSVKINVKESKESHLKFTQDVYSAVVKENSTEAETLAVITAIGSPINEPLFYHILNPDRRFKISRTSGVLSTTGTPFDREQQEAFDVVVEVIEEHKPSAVAHVVVKVIVEDQNDNAPVFVNLPYYAVVKVDTEVGHVIRYVTAVDRDSGRNGEVHYYLKEHHEHFQIGPLGEISLKKQFELDTLNKEYLVTVVAKDGGNPAFSAEVIVPITVMNKAMPVFEKPFYSAEIAESIQVHSPVVHVQANSPEGLKVFYSITDGDPFSQFTINFNTGVINVIAPLDFEAHPAYKLSIRATDSLTGAHAEVFVDIIVDDINDNPPVFAQQSYAVTLSEASVIGTSVVQVRATDSDSEPNRGISYQMFGNHSKSHDHFHVDSSTGLISLLRTLDYEQSRQHTIFVRAVDGGMPTLSSDVIVTVDVTDLNGNPPLFEQQIYEARISEHAPHGHFVTCVKAYDADSSDIDKLQYSILSGNDHKHFVIDSATGIITLSNLHRHALKPFYSLNLSVSDGVFRSSTQVHVTVIGGNLHSPAFLQNEYEVELAENAPLHTLVMEVKTTDGDSGIYGHVTYHIVNDFAKDRFYINERGQIFTLEKLDRETPAEKVISVRLMAKDAGGKVAFCTVNVILTDDNDNAPQFRATKYEVNIGSSAAKGTSVVKSASDADEGSNADITYAIEADSESVKENLEINKLSGVITTKESLIGLENEFFTFFVRAVDNGSPSKESVVLVYVKILPPEMQLPKFSEPFYTFTVSEDVPVGTEIDLIRAEHSGTVLYSLVKGNTPESNRDESFVIDRQSGRLKLEKSLDHETTKWYQFSILARCTQDDHEMVASVDVSIQVKDANDNSPVFESSPYEAFIVENLPGGSRVIQIRASDADSGTNGQVMYSLDQSQSVEVIESFAINMETGWITTLKELDHEKRDNYQIKVVASDHGEKIQLSSTAIVDVTVTDVNDSPPRFTAEIYKGTVSEDDPQGGVIAILSTTDADSEEINRQVTYFITGGDPLGQFAVETIQNEWKVYVKKPLDREKRDNYLLTITATDGTFSSKAIVEVKVLDANDNSPVCEKTLYSDTIPEDVLPGKLIMQISATDADIRSNAEITYTLLGSGAEKFKLNPDTGELKTSTPLDREEQAVYHLLVRATDGGGRFCQASIVVTLEDVNDNAPEFSADPYAITVFENTEPGTLLTRVQATDADAGLNRKILYSLIDSADGQFSINELSGIIQLEKPLDRELQAVYTLSLKAVDQGLPRRLTATGTVIVSVLDINDNPPVFEYREYGATVSEDILVGTEVLQVYAASRDIEANAEITYSIISGNEHGKFSIDSKTGAVFIIENLDYESSHEYYLTVEATDGGTPSLSDVATVNVNVTDINDNTPVFSQDTYTTVISEDAVLEQSVITVMADDADGPSNSHIHYSIIDGNQGSSFTIDPVRGEVKVTKLLDRETISGYTLTVQASDNGSPPRVNTTTVNIDVSDVNDNAPVFSRGNYSVIIQENKPVGFSVLQLVVTDEDSSHNGPPFFFTIVTGNDEKAFEVNPQGVLLTSSAIKRKEKDHYLLQVKVADNGKPQLSSLTYIDIRVIEESIYPPAILPLEIFITSSGEEYSGGVIGKIHATDQDVYDTLTYSLDPQMDNLFSVSSTGGKLIAHKKLDIGQYLLNVSVTDGKFTTVADITVHIRQVTQEMLNHTIAIRFANLTPEEFVGDYWRNFQRALRNILGVRRNDIQIVSLQSSEPHPHLDVLLFVEKPGSAQISTKQLLHKINSSVTDIEEIIGVRILNVFQKLCAGLDCPWKFCDEKVSVDESVMSTHSTARLSFVTPRHHRAAVCLCKEGRCPPVHHGCEDDPCPEGSECVSDPWEEKHTCVCPSGRFGQCPGSSSMTLTGNSYVKYRLTENENKLEMKLTMRLRTYSTHAVVMYARGTDYSILEIHHGRLQYKFDCGSGPGIVSVQSIQVNDGQWHAVALEVNGNYARLVLDQVHTASGTAPGTLKTLNLDNYVFFGGHIRQQGTRHGRSPQVGNGFRGCMDSIYLNGQELPLNSKPRSYAHIEESVDVSPGCFLTATEDCASNPCQNGGVCNPSPAGGYYCKCSALYIGTHCEISVNPCSSNPCLYGGTCVVDNGGFVCQCRGLYTGQRCQLSPYCKDEPCKNGGTCFDSLDGAVCQCDSGFRGERCQSDIDECSGNPCLHGALCENTHGSYHCNCSHEYRGRHCEDAAPNQYVSTPWNIGLAEGIGIVVFVAGIFLLVVVFVLCRKMISRKKKHQAEPKDKHLGPATAFLQRPYFDSKLNKNIYSDIPPQVPVRPISYTPSIPSDSRNNLDRNSFEGSAIPEHPEFSTFNPESVHGHRKAVAVCSVAPNLPPPPPSNSPSDSDSIQKPSWDFDYDTKVVDLDPCLSKKPLEEKPSQPYSARESLSEVQSLSSFQSESCDDNGYHWDTSDWMPSVPLPDIQEFPNYEVIDEQTPLYSADPNAIDTDYYPGGYDIESDFPPPPEDFPAADELPPLPPEFSNQFESIHPPRDMPAAGSLGSSSRNRQRFNLNQYLPNFYPLDMSEPQTKGTGENSTCREPHAPYPPGYQRHFEAPAVESMPMSVYASTASCSDVSACCEVESEVMMSDYESGDDGHFEEVTIPPLDSQQHTEV

SEQ ID NO: 158 - protein, 321 aa, Homo sapiens
MKPGFSPRGGGFGGRGGFGDRGGRGGRGGFGGGRGRGGGFRGRGRGGGGGGGGGGGGGRGGGGFHSGGNRGRGRGGKRGNQSGKNVMVEPHRHEGVFICRGKEDALVTKNLVPGESVYGEKRVSISEGDDKIEYRAWNPFRSKLAAAILGGVDQIHIKPGAKVLYLGAASGTTVSHVSDIVGPDGLVYAVEFSHRSGRDLINLAKKRTNIIPVIEDARHPHKYRMLIAMVDVIFADVAQPDQTRIVALNAHTFLRNGGHFVISIKANCIDSTASAEAVFASEVKKMQQENMKPQEQLTLEPYERDHAVVVGVYRPPPKVKN

SEQ ID NO: 159 - protein, 1464 aa, Homo sapiens
MFSFVDLRLLLLLAATALLTHGQEEGQVEGQDEDIPPITCVQNGLRYHDRDVWKPEPCRICVCDNGKVLCDDVICDETKNCPGAEVPEGECCPVCPDGSESPTDQETTGVEGPKGDTGPRGPRGPAGPPGRDGIPGQPGLPGPPGPPGPPGPPGLGGNFAPQLSYGYDEKSTGGISVPGPMGPSGPRGLPGPPGAPGPQGFQGPPGEPGEPGASGPMGPRGPPGPPGKNGDDGEAGKPGRPGERGPPGPQGARGLPGTAGLPGMKGHRGFSGLDGAKGDAGPAGPKGEPGSPGENGAPGQMGPRGLPGERGRPGAPGPAGARGNDGATGAAGPPGPTGPAGPPGFPGAVGAKGEAGPQGPRGSEGPQGVRGEPGPPGPAGAAGPAGNPGADGQPGAKGANGAPGIAGAPGFPGARGPSGPQGPGGPPGPKGNSGEPGAPGSKGDTGAKGEPGPVGVQGPPGPAGEEGKRGARGEPGPTGLPGPPGERGGPGSRGFPGADGVAGPKGPAGERGSPGPAGPKGSPGEAGRPGEAGLPGAKGLTGSPGSPGPDGKTGPPGPAGQDGRPGPPGPPGARGQAGVMGFPGPKGAAGEPGKAGERGVPGPPGAVGPAGKDGEAGAQGPPGPAGPAGERGEQGPAGSPGFQGLPGPAGPPGEAGKPGEQGVPGDLGAPGPSGARGERGFPGERGVQGPPGPAGPRGANGAPGNDGAKGDAGAPGAPGSQGAPGLQGMPGERGAAGLPGPKGDRGDAGPKGADGSPGKDGVRGLTGPIGPPGPAGAPGDKGESGPSGPAGPTGARGAPGDRGEPGPPGPAGFAGPPGADGQPGAKGEPGDAGAKGDAGPPGPAGPAGPPGPIGNVGAPGAKGARGSAGPPGATGFPGAAGRVGPPGPSGNAGPPGPPGPAGKEGGKGPRGETGPAGRPGEVGPPGPPGPAGEKGSPGADGPAGAPGTPGPQGIAGQRGVVGLPGQRGERGFPGLPGPSGEPGKQGPSGASGERGPPGPMGPPGLAGPPGESGREGAPAAEGSPGRDGSPGAKGDRGETGPAGPPGAPGAPGAPGPVGPAGKSGDRGETGPAGPAGPVGPVGARGPAGPQGPRGDKGETGEQGDRGIKGHRGFSGLQGPPGPPGSPGEQGPSGASGPAGPRGPPGSAGAPGKDGLNGLPGPIGPPGPRGRTGDAGPVGPPGPPGPPGPPGPPSAGFDFSFLPQPPQEKAHDGGRYYRADDANVVRDRDLEVDTTLKSLSQQIENIRSPEGSRKNPARTCRDLKMCHSDWKSGEYWIDPNQGCNLDAIKVFCNMETGETCVYPTQPSVAQKNWYISKNPKDKRHVWFGESMTDGFQFEYGGQGSDPADVAIQLTFLRLMSTEASQNITYHCKNSVAYMDQQTGNLKKALLLKGSNEIEIRAEGNSRFTYSVTVDGCTSHTGAWGKTVIEYKTTKSSRLPIIDVAPLDVGAPDQEFGFDVGPVCFL

SEQ ID NO: 160 - protein, 1222 aa, Homo sapiens; identical to SEQ ID NO: 74

SEQ ID NO: 161 - protein, 853 aa, Homo sapiens
MGTPRAQHPPPPQLLFLILLSCPWIQGLPLKEEEILPEPGSETPTVASEALAELLHGALLRRGPEMGYLPGPPLGPEGGEEETTTTIITTTTVTTTVTSPVLCNNNISEGEGYVESPDLGSPVSRTLGLLDCTYSIHVYPGYGIEIQVQTLNLSQEEELLVLAGGGSPGLAPRLLANSSMLGEGQVLRSPTNRLLLHFQSPRVPRGGGFRIHYQAYLLSCGFPPRPAHGDVSVTDLHPGGTATFHCDSGYQLQGEETLICLNGTRPSWNGETPSCMASCGGTIHNATLGRIVSPEPGGAVGPNLTCRWVIEAAEGRRLHLHFERVSLDEDNDRLMVRSGGSPLSPVIYDSDMDDVPERGLISDAQSLYVELLSETPANPLLLSLRFEAFEEDRCFAPFLAHGNVTTTDPEYRPGALATFSCLPGYALEPPGPPNAIECVDPTEPHWNDTEPACKAMCGGELSEPAGVVLSPDWPQSYSPGQDCVWGVHVQEEKRILLQVEILNVREGDMLTLFDGDGPSARVLAQLRGPQPRRRLLSSGPDLTLQFQAPPGPPNPGLGQGFVLHFKEVPRNDTCPELPPPEWGWRTASHGDLIRGTVLTYQCEPGYELLGSDILTCQWDLSWSAAPPACQKIMTCADPGEIANGHRTASDAGFPVGSHVQYRCLPGYSLEGAAMLTCYSRDTGTPKWSDRVPKCALKYEPCLNPGVPENGYQTLYKHHYQAGESLRFFCYEGFELIGEVTITCVPGHPSQWTSQPPLCKVAYEELLDNRKLEVTQTTDPSRQLEGGNLALAILLPLGLVIVLGSGVYIYYTKLQGKSLFGFSGSHSYSPITVESDFSNPLYEAGDTREYEVSI

SEQ ID NO: 162 - protein, 80 aa, Homo sapiens
MGRAMVARLGLGLLLLALLLPTQIYSSETTTGTSSNSSQSTSNSGLAPNPTNATTKAAGGALQSTASLFVVSLSLLHLYS

SEQ ID NO: 163 - protein, 157 aa, Homo sapiens
MQLTVKALQGRECSLQVPEDELVSTLKQLVSEKLNVPVRQQRLLFKGKALADGKRLSDYSIGPNSKLNLVVKPLEKVLLEEGEAQRLADSPPPQVWQLISKVLARHFSAADASRVLEQLQRDYERSLSRLTLDDIERLASRFLHPEVTETMEKGFSK

SEQ ID NO: 164 - protein, 477 aa, Homo sapiens
MTCSKLLVMELCFGKMINLSVPDTIDERAINKKKLTPFIIQENLNLALNSASAIGCHVVNIGAEDLRAGKPHLVLGLLWQIIKIGLFADIELSRNEALAALLRDGETLEELMKLSPEELLLRWANFHLENSGWQKINNFSADIKDSKAYFHLLNQIAPKGQKEGEPRIDINMSGFNETDDLKRAESMLQQADKLGCRQFVTPADVVSGNPKLNLAFVANLFNKYPALTKPENQDIDWTLLEGETREERTFRNWMNSLGVNPHVNHLYADLQDALVILQLYERIKVPVDWSKVNKPPYPKLGANMKKLENCNYAVELGKHPAKFSLVGIGGQDLNDGNQTLTLALVWQLMRRYTLNVLEDLGDGQKANDDIIVNWVNRTLSEAGKSTSIQSFKDKTISSSLAVVDLIDAIQPGCINYDLVKSGNLTEDDKHNNAKYAVSMARRIGARVYALPEDLVEVKPKMVMTVFACLMGRGMKRV

SEQ ID NO: 165 - protein, 591 aa, Homo sapiens
MQQDGLGVGTRNGSGKGRSVHPSWPWCAPRPLRYFGRDARARRAQTAAMALAIQVTVSNPYHVVILFQPVTLPCTYQMTSTPTQPIVIWKYKSFCRDRIADAFSPASVDNQLNAQLAAGNPGYNPYVECQDSVRTVRVVATKQGNAVTLGDYYQGRRITITGNADLTFDQTAWGDSGVYYCSVVSAQDLQGNNEAYAELIVLGRTSGVAELLPGFQAGPIEDWLFVVVVCLAAFLIFLLLGICWCQCCPHTCCCYVRCPCCPDKCCCPEALYAAGKAATSGVPSIYAPSTYAHLSPAKTPPPPAMIPMGPAYNGYPGGYPGDVDRSSSVRSGYRIQASQQDDSMRVLYYMEKELANFDPSRPGPPSGRVERAMSEVTSLHEDDWRSRPSRGPALTPIRDEEWGGHSPRSPRGWDQEPAREQAGGGWRARRPRARSVDALDDLTPPSTAESGSRSPTSNGGRSRAYMPPRSRSRDDLYDQDDSRDFPRSRDPHYDDFRSRERPPADPRSHHHRTRDPRDNGSRSGDLPYDGRLLEEAVRKKGSEERRRPHKEEEEEAYYPPAPPPYSETDSQASRERRLKKNLALSRESLVV

SEQ ID NO: 166 - protein, 1516 aa, Homo sapiens
MAPYPCGCHILLLLFCCLAAARANLLNLNWLWFNNEDTSHAATTIPEPQGPLPVQPTADTTTHVTPRNGSTEPATAPGSPEPPSELLEDGQDTPTSAESPDAPEENIAGVGAEILNVAKGIRSFVQLWNDTVPTESLARAETLVLETPVGPLALAGPSSTPQENGTTLWPSRGIPSSPGAHTTEAGTLPAPTPSPPSLGRPWAPLTGPSVPPPSSERISEEVGLLQLLGDPPPQQVTQTDDPDVGLAYVFGPDANSGQVARYHFPSLFFRDFSLLFHIRPATEGPGVLFAITDSAQAMVLLGVKLSGVQDGHQDISLLYTEPGAGQTHTAASFRLPAFVGQWTHLALSVAGGFVALYVDCEEFQRMPLARSSRGLELEPGAGLFVAQAGGADPDKFQGVIAELKVRRDPQVSPMHCLDEEGDDSDGAFGDSGSGLGDARELLREETGAALKPRLPAPPPVTTPPLAGGSSTEDSRSEEVEEQTTVASLGAQTLPGSDSVSTWDGSVRTPGGRVKEGGLKGQKGEPGVPGPPGRAGPPGSPCLPGPPGLPCPVSPLGPAGPALQTVPGPQGPPGPPGRDGTPGRDGEPGDPGEDGKPGDTGPQGFPGTPGDVGPKGDKGDPGVGERGPPGPQGPPGPPGPSFRHDKLTFIDMEGSGFGGDLEALRGPRGFPGPPGPPGVPGLPGEPGRFGVNSSDVPGPAGLPGVPGREGPPGFPGLPGPPGPPGREGPPGRTGQKGSLGEAGAPGHKGSKGAPGPAGARGESGLAGAPGPAGPPGPPGPPGPPGPGLPAGFDDMEGSGGPFWSTARSADGPQGPPGLPGLKGDPGVPGLPGAKGEVGADGIPGFPGLPGREGIAGPQGPKGDRGSRGEKGDPGKDGVGQPGLPGPPGPPGPVVYVSEQDGSVLSVPGPEGRPGFAGFPGPAGPKGNLGSKGERGSPGPKGEKGEPGSIFSPDGGALGPAQKGAKGEPGFRGPPGPYGRPGYKGEIGFPGRPGRPGMNGLKGEKGEPGDASLGFGMRGMPGPPGPPGPPGPPGTPVYDSNVFAESSRPGPPGLPGNQGPPGPKGAKGEVGPPGPPGQFPFDFLQLEAEMKGEKGDRGDAGQKGERGEPGGGGFFGSSLPGPPGPPGPRGYPGIPGPKGESIRGQPGPPGPQGPPGIGYEGRQGPPGPPGPPGPPSFPGPHRQTISVPGPPGPPGPPGPPGTMGASSGVRLWATRQAMLGQVHEVPEGWLIFVAEQEELYVRVQNGFRKVQLEARTPLPRGTDNEVAALQPPVVQLHDSNPYPRREHPHPTARPWRADDILASPPRLPEPQPYPGAPHHSSYVHLRPARPTSPPAHSHRDFQPVLHLVALNSPLSGGMRGIRGADFQCFQQARAVGLAGTFRAFLSSRLQDLYSIVRRADRAAVPIVNLKDELLFPSWEALFSGSEGPLKPGARIFSFDGKDVLRHPTWPQKSVWHGSDPNGRRLTESYCETWRTEAPSATGQASSLLGGRLLGQSAASCHHAYIVLCIENSFMTASK

SEQ ID NO: 167 - protein, 235 aa, Homo sapiens
MDPARPLGLSILLLFLTEAALGDAAQEPTGNNAEICLLPLDYGPCRALLLRYYYDRYTQSCRQFLYGGCEGNANNFYTWEACDDACWRIEKVPKVCRLQVSVDDQCEGSTEKYFFNLSSMTCEKFFSGGCHRNRIENRFPDEATCMGFCAPKKIPSFCYSPKDEGLCSANVTRYYFNPRYRTCDAFTYTGCGGNDNNFVSREDCKRACAKALKKKKKMPKLRFASRIRKIRKKQF

SEQ ID NO: 168 - protein, 202 aa, Homo sapiens
MCYGKCARCIGHSLVGLALLCIAANILLYFPNGETKYASENHLSRFVWFFSGIVGGGLLMLLPAFVFIGLEQDDCCGCCGHENCGKRCAMLSSVLAALIGIAGSGYCVIVAALGLAEGPLCLDSLGQWNYTFASTEGQYLLDTSTWSECTEPKHIVEWNVSLFSILLALGGIEFILCLIQVINGVLGGICGFCCSHQQQYDC

SEQ ID NO: 169 - protein, 110 aa, Homo sapiens
MARGNQRELARQKNMKKTQEISKGKRKEDSLTASQRKQSSGGQKSESKMSAGPHLPLKAPRENPCFPLPAAGGSRYYLAYGSITPISAFVFVVFFSVFFPSFYEDFCCWI

SEQ ID NO: 170 - protein, 103 aa, Homo sapiens
MARGNQRELARQKNMKKTQEISKGKRKEDSLTASQRKQSSGGQKSESKMSAGPHLPLKAPRENPCFPLPAAGGSRLLLGLWQHNSYLCLCLCGLLFCLLPFFL

SEQ ID NO: 171 - protein, 1172 aa, Homo sapiens
MVWRLVLLALWVWPSTQAGHQDKDTTFDLFSISNINRKTIGAKQFRGPDPGVPAYRFVRFDYIPPVNADDLSKITKIMRQKEGFFLTAQLKQDGKSRGTLLALEGPGLSQRQFEIVSNGPADTLDLTYWIDGTRHVVSLEDVGLADSQWKNVTVQVAGETYSLHVGCDLIGPVALDEPFYEHLQAEKSRMYVAKGSARESHFRGLLQNVHLVFENSVEDILSKKGCQQGQGAEINAISENTETLRLGPHVTTEYVGPSSERRPEVCERSCEELGNMVQELSGLHVLVNQLSENLKRVSNDNQFLWELIGGPPKTRNMSACWQDGRFFAENETWVVDSCTTCTCKKFKTICHQITCPPATCASPSFVEGECCPSCLHSVDGEEGWSPWAEWTQCSVTCGSGTQQRGRSCDVTSNTCLGPSIQTRACSLSKCDTRIRQDGGWSHWSPWSSCSVTCGVGNITRIRLCNSPVPQMGGKNCKGSGRETKACQGAPCPIDGRWSPWSPWSACTVTCAGGIRERTRVCNSPEPQYGGKACVGDVQERQMCNKRSCPVDGCLSNPCFPGAQCSSFPDGSWSCGFCPVGFLGNGTHCEDLDECALVPDICFSTSKVPRCVNTQPGFHCLPCPPRYRGNQPVGVGLEAAKTEKQVCEPENPCKDKTHNCHKHAECIYLGHFSDPMYKCECQTGYAGDGLICGEDSDLDGWPNLNLVCATNATYHCIKDNCPHLPNSGQEDFDKDGIGDACDDDDDNDGVTDEKDNCQLLFNPRQADYDKDEVGDRCDNCPYVHNPAQIDTDNNGEGDACSVDIDGDDVFNERDNCPYVYNTDQRDTDGDGVGDHCDNCPLVHNPDQTDVDNDLVGDQCDNNEDIDDDGHQNNQDNCPYISNANQADHDRDGQGDACDPDDDNDGVPDDRDNCRLVFNPDQEDLDGDGRGDICKDDFDNDNIPDIDDVCPENNAISETDFRNFQMVPLDPKGTTQIDPNWVIRHQGKELVQTANSDPGIAVGFDEFGSVDFSGTFYVNTDRDDDYAGFVFGYQSSSRFYVVMWKQVTQTYWEDQPTRAYGYSGVSLKVVNSTTGTGEHLRNALWHTGNTPGQVRTLWHDPRNIGWKDYTAYRWHLTHRPKTGYIRVLVHEGKQVMADSGPIYDQTYAGGRLGLFVFSQEMVYFSDLKYECRDI

SEQ ID NO: 172 - protein, 751 aa, Homo sapiens
MAFRTICVLVGVFICSICVKGSSQPQARVYLTFDELRETKTSEYFSLSHHPLDYRILLMDEDQDRIYVGSKDHILSLNINNISQEALSVFWPASTIKVEECKMAGKDPTHGCGNFVRVIQTFNRTHLYVCGSGAFSPVCTYLNRGRRSEDQVFMIDSKCESGKGRCSFNPNVNTVSVMINEELFSGMYIDFMGTDAAIFRSLTKRNAVRTDQHNSKWLSEPMFVDAHVIPDGTDPNDAKVYFFFKEKLTDNNRSTKQIHSMIARICPNDTGGLRSLVNKWTTFLKARLVCSVTDEDGPETHFDELEDVFLLETDNPRTTLVYGIFTTSSSVFKGSAVCVYHLSDIQTVFNGPFAHKEGPNHQLISYQGRIPYPRPGTCPGGAFTPNMRTTKEFPDDVVTFIRNHPLMYNSIYPIHKRPLIVRIGTDYKYTKIAVDRVNAADGRYHVLFLGTDRGTVQKVVVLPTNNSVSGELILEELEVFKNHAPITTMKISSKKQQLYVSSNEGVSQVSLHRCHIYGTACADCCLARDPYCAWDGHSCSRFYPTGKRRSRRQDVRHGNPLTQCRGFNLKAYRNAAEIVQYGVKNNTTFLECAPKSPQASIKWLLQKDKDRRKEVKLNERIIATSQGLLIRSVQGSDQGLYHCIATENSFKQTIAKINFKVLDSEMVAVVTDKWSPWTWASSVRALPFHPKDIMGAFSHSEMQMINQYCKDTRQQHQQGDESQKMRGDYGKLKALINSRKSRNRRNQLPES

SEQ ID NO: 173 - protein, 349 aa, Homo sapiens
MTAASMGPVRVAFVVLLALCSRPAVGQNCSGPCRCPDEPAPRCPAGVSLVLDGCGCCRVCAKQLGELCTERDPCDPHKGLFCDFGSPANRKIGVCTAKDGAPCIFGGTVYRSGESFQSSCKYQCTCLDGAVGCMPLCSMDVRLPSPDCPFPRRVKLPGKCCEEWVCDEPKDQTVVGPALAAYRLEDTFGPDPTMIRANCLVQTTEWSACSKTCGMGISTRVTNDNASCRLEKQSRLCMVRPCEADLEENIKKGKKCIRTPKISKPIKFELSGCTSMKTYRAKFCGVCTDGRCCTPHRTTTLPVEFKCPDGEVMKKNMMFIKTCACHYNCPGDNDIFESLYYRKMYGDMA

SEQ ID NO: 174 - DNA, 1763 bp, Homo sapiens
ggagacgctgcagacccgcgacccggagcagctcggaggcggtgaataatagctcttcaagtctgcaataaaaaatggcctccaacaaaactacattgcaaaaaatgggaaaaaaacagaatggaaagagtaaaaaagttgaagaggcagagcctgaagaatttgtcgtggaaaaagtactagatcgacgtgtagtgaatgggaaagtagaatatttcctgaagtggaagggatttacagatgctgacaatacttgggaacctgaagaaaatttagattgtccagaattgattgaagcgtttcttaactctcagaaagctggcaaagaaaaagatggtacaaaaagaaaatctttatctgacagtgaatctgatgacagcaaatcaaagaagaaaagagatgctgttgacaaaccaagaggatttgccagaggtcttgatcctgaaagaataattggtgccacagacagcagtggagaattgatgtttctcatgaaatggaaagattcagatgaggcagacttggtgctggcgaaagaggcaaatatgaagtgtcctcaaattgtaattgctttttatgaagagagactaacttggcattcttgtccagaagatgaagctcaataattgttcacattgttcttttatatatatttatatatatatataaaaattgggtcttagattttgatttactagtgtgacaaaataactacatcctaatgaaaatcaagtttgatatgtttgttttgaaagtagcgttggaagagttgttggggtttttttgcatccatagcactggttactttgaacaaataaataaaagctttctgtagttgcttcctttatcagaaaagaacatttgataccatggtatatcatttcctcttcattaaagaacagcttttctaaatgttgggggaaatgtccatagtcattactcagtcaaaacttgtgttctcatgagcctaaggaccattctagatttattacgtgttttttgtgtgtgtgtgtgtgtgtgtgtgtgtgtatccataaaatgcatatgtaaatttttttttgtttttaagcattcacccaaacaaaaaaatcacaggtaaacccatgtttctgagatgccattattccaagcaaaataagagataatcccttcaagttaaattgaaaattttcctgaaaccatacatttcaagtgaaataagtaattctagataggacaatttaaattggataattttaaagtgtctataattgcagtggtttatttgcaaaattcctaaaaggaaaaattttatcactgccatcacagcaggtttcctcatccagatgaggaaactagacaaatgctagtgtgttttaactagctaaacaaaactaagttaaatgaacatttaaaagtttccctagcgggccattccttagcaaaatgttggaatccctgttgctacattgactaaaaggtcatgatgaatggaatatgtaagacttggctcatagaaacctaatcagatggttagaggtgttggcagtttaggacctgctgtcataaatgtgtgaacaaccttttgtaacctaacctattgacctgcatgttttttctttaccccaattcattacatggaggctcaatcttgagtttgctttactggttcagcaaaagccaggaagaacaactttgtagtaatcaaaatgttatccaactgtatattgtttactttattgtaaatactggtgaacagtggttaataaatagttttatattcc

SEQ ID NO: 175 - DNA, 5206 bp, Homo sapiens
ataaaagggggctgaggaaataccggacacggtcacccgttgccagctctagcctttaaattcccggctcggggacctccacgcaccgcggctagcgccgacaaccagctagcgtgcaaggcgccgcggctcagcgcgtaccggcgggcttcgaaaccgcagtcctccggcgaccccgaactccgctccggagcctcagccccctggaaagtgatcccggcatccgagagccaagatgccggcccacttgctgcaggacgatatctctagctcctataccaccaccaccaccattacagcgcctccctccagggtcctgcagaatggaggagataagttggagacgatgcccctctacttggaagacgacattcgccctgatataaaagatgatatatatgaccccacctacaaggataaggaaggcccaagccccaaggttgaatatgtctggagaaacatcatccttatgtctctgctacacttgggagccctgtatgggatcactttgattcctacctgcaagttctacacctggctttggggggtattctactattttgtcagtgccctgggcataacagcaggagctcatcgtctgtggagccaccgctcttacaaagctcggctgcccctacggctctttctgatcattgccaacacaatggcattccagaatgatgtctatgaatgggctcgtgaccaccgtgcccaccacaagttttcagaaacacatgctgatcctcataattcccgacgtggctttttcttctctcacgtgggttggctgcttgtgcgcaaacacccagctgtcaaagagaaggggagtacgctagacttgtctgacctagaagctgagaaactggtgatgttccagaggaggtactacaaacctggcttgctgctgatgtgcttcatcctgcccacgcttgtgccctggtatttctggggtgaaacttttcaaaacagtgtgttcgttgccactttcttgcgatatgctgtggtgcttaatgccacctggctggtgaacagtgctgcccacctcttcggatatcgtccttatgacaagaacattagcccccgggagaatatcctggtttcacttggagctgtgggtgagggcttccacaactaccaccactcctttccctatgactactctgccagtgagtaccgctggcacatcaacttcaccacattcttcattgattgcatggccgccctcggtctggcctatgaccggaagaaagtctccaaggccgccatcttggccaggattaaaagaaccggagatggaaactacaagagtggctgagtttggggtccctcaggtttcctttttcaaaaaccagccaggcagaggttttaatgtctgtttattaactactgaataatgctaccaggatgctaaagatgatgatgttaacccattccagtacagtattcttttaaaattcaaaagtattgaaagccaacaactctgcctttatgatgctaagctgatattatttcttctcttatcctctctctcttctaggcccattgtcctccttttcactttattgctatcgccctcctttcccttattgcctcccaggcaagcagctggtcagtctttgctcagtgtccagcttccaaagcctagacaacctttctgtagcctaaaacgaatggtctttgctccagataactctctttccttgagctgttgtgagctttgaagtaggtggcttgagctagagataaaacagaatcttctgggtagtcccctgttgattatcttcagcccaggcttttgctagatggaatggaaaagcaacttcatttgacacaaagcttctaaagcaggtaaattgtcgggggagagagttagcatgtatgaatgtaaggatgagggaagcgaagcaagaggaacctctcgccatgatcagacatacagctgcctacctaatgaggacttcaagccccaccacatagcatgcttcctttctctcctggctcggggtaaaaagtggctgcggtgtttggcaatgctaattcaatgccgcaacatatagttgaggccgaggataaagaaaagacattttaagtttgtagtaaaagtggtctctgctggggaagggttttcttttctttttttctttaataacaaggagatttcttagttcatatatcaagaagtcttgaagttgggtgtttccagaattggtaaaaacagcagctcatggaattttgagtattccatgagctgctcattacagttctttcctctttctgctctgccatcttcaggatattggttcttcccctcatagtaataagatggctgtggcatttccaaacatccaaaaaaagggaaggatttaaggaggtgaagtcgggtcaaaaataaaatatatatacatatatacattgcttagaacgttaaactattagagtatttcccttccaaagagggatgtttggaaaaaactctgaaggagaggaggaattagttgggatgccaatttcctctccactgctggacatgagatggagaggctgagggacaggatctataggcagcttctaagagcgaacttcacataggaagggatctgagaacacgttgccaggggcttgagaaggttactgagtgagttattgggagtcttaataaaataaactagatattaggtccattcattaattagttccagtttctccttgaaatgagtaaaaactagaaggcttctctccacagtgttgtgccccttcactcatttttttttgaggagaagggggtctctgttaacatctagcctaaagtatacaactgcctggggggcagggttaggaatctcttcactaccctgattcttgattcctggctctaccctgtctgtcccttttctttgaccagatctttctcttccctgaacgttttcttctttccctggacaggcagcctcctttgtgtgtattcagaggcagtgatgacttgctgtccaggcagctccctcctgcacacagaatgctcagggtcactgaaccactgcttctcttttgaaagtagagctagctgccactttcacgtggcctccgcagtgtctccacctacacccctgtgctcccctgccacactgatggctcaagacaaggctggcaaaccctcccagaaacatctctggcccagaaagcctctctctccctccctctctcatgaggcacagccaagccaagcgctcatgttgagccagtgggccagccacagagcaaaagagggtttattttcagtcccctctctctgggtcagaaccagagggcatgctgaatgccccctgcttacttggtgagggtgccccgcctgagtcagtgctctcagctggcagtgcaatgcttgtagaagtaggaggaaacagttctcactgggaagaagcaagggcaagaacccaagtgcctcacctcgaaaggaggccctgttccctggagtcagggtgaactgcaaagctttggctgagacctgggatttgagataccacaaaccctgctgaacacagtgtctgttcagcaaactaaccagcattccctacagcctagggcagacaatagtatagaagtctggaaaaaaacaaaaacagaatttgagaaccttggaccactcctgtccctgtagctcagtcatcaaagcagaagtctggctttgctctattaagattggaaatgtacactaccaaacactcagtccactgttgagccccagtgctggaagggaggaaggcctttcttctgtgttaattgcgtagaggctacaggggttagcctggactaaaggcatccttgtcttttgagctattcacctcagtagaaaaggatctaagggaagatcactgtagtttagttctgttgacctgtgcacctaccccttggaaatgtctgctggtatttctaattccacaggtcatcagatgcctgcttgataatatataaacaataaaaacaactttcacttcttcctattgtaatcgtgtgccatggatctgatctgtaccatgaccctacataaggctggatggcacctcaggctgagggccccaatgtatgtgtggctgtgggtgtgggtgggagtgtgtctgctgagtaaggaacacgattttcaagattctaaagctcaattcaagtgacacattaatgataaactcagatctgatcaagagtccggatttctaacagtccctgctttggggggtgtgctgacaacttagctcaggtgccttacatcttttctaatcacagtgttgcatatgagcctgccctcactccctctgcagaatccctttgcacctgagaccctactgaagtggctggtagaaaaaggggcctgagtggaggattatcagtatcacgatttgcaggattcccttctgggcttcattctggaaacttttgttagggctgcttttcttaagtgcccacatttgatggagggtggaaataatttgaatgtatttgatttataagtttttttttttttttgggttaaaagatggttgtagcatttaaaatggaaaattttctccttggtttgctagtatcttgggtgtattctctgtaagtgtagctcaaataggtcatcatgaaaggttaaaaaagcgaggtggccatgttatgctggtggttaaggccagggcctctccaaccactgtgccactgacttgctgtgtgaccctgggcaagtcacttaactataaggtgcctcagttttccttctgttaaaatggggataataatactgacctacctcaaagggcagttttgaggcatgactaatgctttttagaaagcattttgggatccttcagcacaggaattctcaagacctgagtattttttataataggaatgtccaccatgaacttgatacgtccgtgtgtcccagatgctgtcattagtctatatggttctccaagaaactgaatgaatccattggagaagcggtggataactagccagacaaaatttgagaatacataaacaacgcattgccacggaaacatacagaggatgccttttctgtgattgggtgggattttttccctttttatgtgggatatagtagttacttgtgacaaaaataattttggaataatttctattaatatcaactctgaagctaattgtactaatctgagattgtgtttgttcataataaaagtgaagtgaatct

SEQ ID NO: 176 - DNA, 2454 bp, Homo sapiens
ccaggaggcacgctggttttccggggccgctccatcgcgccttcctcctgcgcctcgcttctccggtccagccgccatcttcctttccgcacaggggccgccgagcggggccatgcagccaacgctgcttctcagcctcctgggagccgtggggctggcggctgtcaattccatgccagtggataacaggaaccacaatgaaggaatggtgactcgctgcatcattgaggtcctctcaaatgccttgtcgaagtccagcgctccacccatcacccctgagtgccgccaagtcctgaagacgagtagaaaagacgtcaaagacaaagagacaactgaaaatgaaaacacaaagtttgaagtaagattgttaagagacccagctgatgcctcggaagcccacgagtcctccagcaggggagaggcaggagccccaggggaggaggacatccaaggcccaacaaaggcagacacagagaaatgggcagagggaggcgggcacagccgagagcgagcggatgagccccagtggagcctctatccctccgacagccaagtctctgaagaagtgaagacacgccattctgagaagagccagagagaggatgaggaggaggaggagggagagaactatcaaaaaggggagcgaggggaagatagcagtgaagagaaacaccttgaagagccaggagagacacaaaacgcttttctcaatgaaagaaagcaggcttcagctataaaaaaagaggagttagtggccagatcggaaacacatgctgccgggcattctcaggagaagacacatagccgagagaagagtagccaggagagtggagaggagacagggagccaggagaatcacccccaggagtctaaaggccaaccccgaagccaggaagaatctgaggaaggtgaggaagatgccacctctgaggtggacaaacgacgcacgaggcccagacaccaccacgggaggagcaggcccgacaggtcctctcaaggagggagtcttccctctgaggaaaagggacacccccaggaggaatctgaggagtcaaacgtcagcatggccagtttaggggaaaagagggaccaccattcaacccactacagggcttcagaggaagaacctgaatatggagaagaaataaagggttatccaggcgtccaggcccctgaggacctggagtgggagcgctataggggcagaggaagtgaagaatacagggctccaagacctcagagtgaggagagttgggatgaggaggacaagagaaactaccccagcttagagcttgataagatggcacatggatatggtgaagaaagtgaggaagagaggggccttgagccgggaaagggacgccatcacagaggcaggggaggggagccacgtgcctatttcatgtctgacaccagagaagagaaaaggttcttgggtgaaggacaccaccgtgtccaagaaaaccagatggacaaggcaaggaggcatccacaaggtgcgtggaaagagctggacagaaattatctcaactacggtgaggaaggagccccagggaagtggcagcagcagggagacctgcaggacactaaagaaaacagggaggaagctaggtttcaagataaacaatatagctcccatcacacagctgaaaagaggaagagattaggggaactgttcaacccatactacgaccctctccagtggaagagcagccattttgaaagaagagacaacatgaatgacaattttctcgagggtgaggaggaaaatgagctgaccttgaacgagaagaatttcttcccagaatacaactatgactggtgggagaaaaagcccttctctgaggatgtgaactgggggtatgagaagagaaacctcgccagggtccccaagctggacctgaaaaggcaatatgacagggtggcccaactggaccagctccttcactacaggaagaagtcagctgagtttccagacttctatgattctgaggagccggtgagcacccaccaggaggcagaaaatgaaaaggacagggctgaccagacagtcctgacagaggacgagaaaaaagaactcgaaaacttggctgcaatggatttggaactacagaagatagctgagaaattcagccaaaggggctgactgtcattggagcggtgggcactgttaagaagcagccatcacatgatctgtttttcaccacttcactgaaagacaccatttatctacccaagggcagaaagtagaacttactattcattaaatgtttgacacaattggaattgtctttaatttctgtcagaatgctattgaaaatgtgaattgcatgacttgtagcatattcttttctgcaaaatagacatattaacatgcttatgacaatgactgtgctactgtctttggaaaaatgtttgtctcagttggaaataataaaagattcacctgagacc

SEQ ID NO: 177 - DNA, 6815 bp, Homo sapiens
ggcacgagcttctctcccagggcggtgcgacccggagctccagcgcccgagtctccacttcgtttgctgaaacttgctttctaccagctaagaaccatgctgcgagtgattgtggaatctgccagcaatatccctaaaacgaaatttggcaagccggatcctattgtttctgtcatttttaaggatgagaaaaagaaaacaaagaaagttgataatgaattgaaccctgtctggaatgagattttggagtttgacttgaggggtataccactggacttttcatcttcccttgggattattgtgaaagattttgagacaattggacaaaataaattaattggcacggcgactgtagccctgaaggacctgactggtgaccagagcagatccctgccgtacaagctgatctccctgctaaatgaaaaagggcaagatactggggccaccattgacttggtgatcggctatgatccgccttctgctccacatccaaatgacctgagcgggcccagcgtgccaggcatgggaggagatggggaagaagatgaaggtgatgaagacaggttggacaatgcagtcaggggccctgggcccaaggggccagttgggacggtgtcggaagctcagcttgctcggaggctcaccaaagtaaagaacagccggcggatgctgtcaaataagccacaggacttccagatccgcgtccgagtgattgagggccgacagttaagtggtaacaacataaggcctgtggtcaaagttcacgtctgtggccagacacaccgaacaagaatcaagagaggaaacaaccctttttttgatgagttgtttttctacaatgtcaacatgaccccttctgaattgatggatgagatcatcagcatccgggtttataattctcactctctgcgggcagattgtctgatgggggaatttaagattgatgttggatttgtttatgatgaacctggccatgctgtcatgagaaagtggcttcttctcaatgacccggaagataccagttcaggttctaaaggttatatgaaagtcagcatgtttgtcctgggaaccggagatgagcctcctcctgagagacgagatcgtgataatgacagtgatgatgtggagagtaatttgttactccctgctggcattgccctccggtgggtgaccttcttgctgaaaatctaccgagctgaggacatcccccagatggatgatgccttctcacagacagtaaaggaaatatttggaggcaatgcagataagaaaaatctcgtggatccttttgtagaagtttcctttgctggaaaaaaggtttgtacaaacataattgagaaaaatgcaaacccagagtggaatcaggtcgtcaatcttcagatcaagtttccttcagtgtgtgaaaaaataaaactaacaatatatgactgggaccgtcttactaaaaatgatgtagttggaacaacatatctacacctctctaaaattgctgcctctggtggggaagtggaagatttctcatcttcgggaactggggctgcatcatatacagtaaacacaggagaaacagaggtaggctttgttccaacgtttggaccttgttacctgaatctttatggaagccccagggagtacacgggattcccagacccctatgatgagctgaatactggaaagggggaaggagttgcctacagaggcaggatcttggttgaattagccacttttcttgagaagacaccaccagataaaaagcttgagcccatttcaaatgatgacctgctggttgttgagaaataccagcgaaggcggaagtacagcctgtctgccgtgtttcattcagccaccatgttgcaagatgttggtgaggccattcagtttgaagtcagcattgggaactatggcaacaagtttgacaccacctgtaagcctttggcatcaacaactcagtacagccgtgctgtatttgatggcaactactattattacttgccttgggcccacaccaagccagttgttaccctgacttcatactgggaggatattagtcatcgcctggatgcggtgaacactctcctagctatggcagaacggctgcaaacaaatatagaagctctaaaatcagggatacaaggtaaaattcctgcaaaccagctggctgaattgtggctgaagctgatagatgaagttatagaagacacgagatacacgttgcctctcacagaaggaaaagccaacgtcacagttctcgatactcagatccgaaagctgcggtccaggtctctctcccaaatacatgaggcggctgtgaggatgaggtcggaagccacagatgtgaagtccacactggcagaaattgaggactggcttgataaattaatgcagctgactgaagagccacagaacagcatgcctgacatcatcatctggatgatccggggagagaagagactggcctatgcacgaattcccgcacatcaggtcttgtactccaccagtggtgagaatgcatctggaaaatactgtgggaaaacccaaaccatctttctgaagtatccacaggagaaaaacaacgggccaaaggtgcctgtggagttgcgagtgaacatctggctaggcttaagtgctgtggagaagaagtttaacagcttcgcagaaggaactttcaccgtctttgctgaaatgtatgaaaatcaagctctcatgtttggaaaatggggtacttctggattagtaggacgtcataagttttctgatgtcacaggaaaaataaaactcaagagggaattttttctgcctccaaaaggctgggaatgggaaggagagtggatagttgatcctgaaagaagcttgctgactgaggcagatgcaggtcacacggagttcactgatgaagtctatcagaacgagagccgctaccccgggggcgactggaagccggccgaggacacctacacggatgcgaacggcgataaagcagcatcacccagcgagttgacttgtcctccaggttgggaatgggaagatgatgcatggtcttatgacataaatcgagcggtggatgagaaaggctgggaatatggaatcaccattcctcctgatcataagcccaaatcctgggttgcagcagagaaaatgtaccacactcatagacggcgaaggctggtccgaaaacgcaagaaagatttaacacagactgcttcaagcaccgcaagggccatggaggaattgcaagaccaagagggctgggaatatgcttctctaattggctggaaatttcactggaaacaacgtagttcagataccttccgccgcagacgctggaggagaaaaatggctccttcagaaacacatggtgcagctgccatctttaaacttgaaggtgcccttggggcagacactaccgaagatggggatgagaagagcctggagaaacagaagcacagtgccaccactgtgttcggagcaaacacccccattgtttcctgcaattttgacagagtctacatctaccatctgcgctgctatgtctatcaagccagaaacctcttggctttagataaggatagcttttcagatccatatgctcatatctgtttcctccatcggagcaaaaccactgagatcatccattcaaccctgaatcccacgtgggaccaaacaattatattcgatgaagttgaaatctatggggaaccccaaacagttctacagaatccacccaaagttatcatggaactttttgacaatgaccaagtgggcaaagatgaatttttaggacgaagcattttctctcctgtggtgaaactgaactcagaaatggacatcacacccaaacttctctggcacccagtaatgaatggagacaaagcctgcggggatgttcttgtaactgcagagctgattctgaggggcaaggatggctccaaccttcccattcttccccctcaaagggcgccaaatctatacatggtcccccaggggatcaggcctgtggtccagctcactgccattgagattctagcttggggcttaagaaatatgaaaaacttccagatggcttctatcacatcccccagtcttgttgtggagtgtggaggagaaagggtggaatcggtggtgatcaaaaaccttaagaagacacccaactttccaagttctgttctcttcatgaaagtgttcttgcccaaggaggaattgtacatgcccccactggtgatcaaggtcatcgaccacaggcagtttgggcggaagcctgtcgtcggccagtgcaccatcgagcgcctggaccgctttcgctgtgacccttatgcagggaaagaggacatcgtcccacagctcaaagcctcccttctgtctgccccaccatgccgggacatcgttatcgaaatggaagacaccaaaccattactggcttctaagctgacagaaaaggaggaagaaatcgtggactggtggagtaaattttatgcttcctcaggggaacatgaaaaatgcggacagtatattcagaaaggctattccaagctcaagatatataattgtgaactagaaaatgtagcagaatttgagggcctgacagacttctcagatacgttcaagttgtaccgaggcaagtcggatgaaaatgaagatccttctgtggttggagagtttaagggctcctttcggatctaccctctgccggatgaccccagcgtgccagcccctcccagacagtttcgggaattacctgacagcgtcccacaggaatgcacggttaggatttacattgttcgaggcttagagctccagccccaggacaacaatggcctgtgtgacccttacataaaaataacactgggcaaaaaagtcattgaagaccgagatcactacattcccaacactctcaacccagtctttggcaggatgtacgaactgagctgctacttacctcaagaaaaagacctgaaaatttctgtctatgattatgacacctttacccgggatgaaaaagtaggagaaacaattattgatctggaaaaccgattcctttcccgctttgggtcccactgcggcataccagaggagtactgtgtttctggagtcaatacctggcgagatcaactgagaccaacacagctgcttcaaaatgtcgccagattcaaaggcttcccacaacccatcctttccgaagatgggagtagaatcagatatggaggacgagactacagcttggatgaatttgaagccaacaaaatcctgcaccagcacctcggggcccctgaagagcggcttgctcttcacatcctcaggactcaggggctggtccctgagcacgtggaaacaaggactttgcacagcaccttccagcccaacatttcccagggaaaacttcagatgtgggtggatgttttccccaagagtttggggccaccaggccctcctttcaacatcacaccccggaaagccaagaaatactacctgcgtgtgatcatctggaacaccaaggacgttatcttggacgagaaaagcatcacaggagaggaaatgagtgacatctacgtcaaaggctggattcctggcaatgaagaaaacaaacagaaaacagatgtccattacagatctttggatggtgaagggaattttaactggcgatttgttttcccgtttgactaccttccagccgaacaactctgtatcgttgcgaaaaaagagcatttctggagtattgaccaaacggaatttcgaatcccacccaggctgatcattcagatatgggacaatgacaagttttctctggatgactacttgggtttcctagaacttgacttgcgtcacacgatcattcctgcaaaatcaccagagaaatgcaggttggacatgattccggacctcaaagccatgaacccccttaaagccaagacagcctccctctttgagcagaagtccatgaaaggatggtggccatgctacgcagagaaagatggcgcccgcgtaatggctgggaaagtggagatgacattggaaatcctcaacgagaaggaggccgacgagaggccagccgggaaggggcgggacgaacccaacatgaaccccaagctggacttaccaaatcgaccagaaacctccttcctctggttcaccaacccatgcaagaccatgaagttcatcgtgtggcgccgctttaagtgggtcatcatcggcttgctgttcctgcttatcctgctgctcttcgtggccgtgctcctctactctttgccgaactatttgtcaatgaagattgtaaagccaaatgtgtaacaaaggcaaaggcttcatttcaagagtcatccagcaatgagagaatcctgcctctgtagaccaacatccagtgtgattttgtgtctgagaccacaccccagtagcaggttacgccatgtcaccgagccccattgattcccagagggtcttagtcctggaaagtcaggccaacaagcaacgtttgcatcatgttatctcttaagtattaaaagttttattttctaaagtttaaatcatgtttttcaaaatatttttcaaggtggctggttccatttaaaaatcatctttttatatgtgtcttcggttctagacttcagcttttggaaattgctaaatagaattcaaaaatctctgcatcctgaggtgatatacttcatatttgtaatcaactgaaagagctgtgcattataaaatcagttagaatagttagaacaattcttatttatgcccacaaccattgctatattttgtatggatgtcataaaagtctatttaacctctgtaatgaaactaaataaaaatgtttcaccttt

SEQ ID NO: 178 - protein, 183 aa, Homo sapiens [sequence omitted]

SEQ ID NO: 179 - protein, 359 aa, Homo sapiens
MPAHLLQDDISSSYTTTTTITAPPSRVLQNGGDKLETMPLYLEDDIRPDIKDDIYDPTYKDKEGPSPKVEYVWRNIILMSLLHLGALYGITLIPTCKFYTWLWGVFYYFVSALGITAGAHRLWSHRSYKARLPLRLFLIIANTMAFQNDVYEWARDHRAHHKFSETHADPHNSRRGFFFSHVGWLLVRKHPAVKEKGSTLDLSDLEAEKLVMFQRRYYKPGLLLMCFILPTLVPWYFWGETFQNSVFVATFLRYAVVLNATWLVNSAAHLFGYRPYDKNISPRENILVSLGAVGEGFHNYHHSFPYDYSASEYRWHINFTTFFIDCMAALGLAYDRKKVSKAAILARIKRTGDGNYKSG

SEQ ID NO: 180 - protein, 677 aa, Homo sapiens
MQPTLLLSLLGAVGLAAVNSMPVDNRNHNEGMVTRCIIEVLSNALSKSSAPPITPECRQVLKTSRKDVKDKETTENENTKFEVRLLRDPADASEAHESSSRGEAGAPGEEDIQGPTKADTEKWAEGGGHSRERADEPQWSLYPSDSQVSEEVKTRHSEKSQREDEEEEEGENYQKGERGEDSSEEKHLEEPGETQNAFLNERKQASAIKKEELVARSETHAAGHSQEKTHSREKSSQESGEETGSQENHPQESKGQPRSQEESEEGEEDATSEVDKRRTRPRHHHGRSRPDRSSQGGSLPSEEKGHPQEESEESNVSMASLGEKRDHHSTHYRASEEEPEYGEEIKGYPGVQAPEDLEWERYRGRGSEEYRAPRPQSEESWDEEDKRNYPSLELDKMAHGYGEESEEERGLEPGKGRHHRGRGGEPRAYFMSDTREEKRFLGEGHHRVQENQMDKARRHPQGAWKELDRNYLNYGEEGAPGKWQQQGDLQDTKENREEARFQDKQYSSHHTAEKRKRLGELFNPYYDPLQWKSSHFERRDNMNDNFLEGEEENELTLNEKNFFPEYNYDWWEKKPFSEDVNWGYEKRNLARVPKLDLKRQYDRVAQLDQLLHYRKKSAEFPDFYDSEEPVSTHQEAENEKDRADQTVLTEDEKKELENLAAMDLELQKIAEKFSQRG

SEQ ID NO: 181 - protein, 2061 aa, Homo sapiens
MLRVIVESASNIPKTKFGKPDPIVSVIFKDEKKKTKKVDNELNPVWNEILEFDLRGIPLDFSSSLGIIVKDFETIGQNKLIGTATVALKDLTGDQSRSLPYKLISLLNEKGQDTGATIDLVIGYDPPSAPHPNDLSGPSVPGMGGDGEEDEGDEDRLDNAVRGPGPKGPVGTVSEAQLARRLTKVKNSRRMLSNKPQDFQIRVRVIEGRQLSGNNIRPVVKVHVCGQTHRTRIKRGNNPFFDELFFYNVNMTPSELMDEIISIRVYNSHSLRADCLMGEFKIDVGFVYDEPGHAVMRKWLLLNDPEDTSSGSKGYMKVSMFVLGTGDEPPPERRDRDNDSDDVESNLLLPAGIALRWVTFLLKIYRAEDIPQMDDAFSQTVKEIFGGNADKKNLVDPFVEVSFAGKKVCTNIIEKNANPEWNQVVNLQIKFPSVCEKIKLTIYDWDRLTKNDVVGTTYLHLSKIAASGGEVEDFSSSGTGAASYTVNTGETEVGFVPTFGPCYLNLYGSPREYTGFPDPYDELNTGKGEGVAYRGRILVELATFLEKTPPDKKLEPISNDDLLVVEKYQRRRKYSLSAVFHSATMLQDVGEAIQFEVSIGNYGNKFDTTCKPLASTTQYSRAVFDGNYYYYLPWAHTKPVVTLTSYWEDISHRLDAVNTLLAMAERLQTNIEALKSGIQGKIPANQLAELWLKLIDEVIEDTRYTLPLTEGKANVTVLDTQIRKLRSRSLSQIHEAAVRMRSEATDVKSTLAEIEDWLDKLMQLTEEPQNSMPDIIIWMIRGEKRLAYARIPAHQVLYSTSGENASGKYCGKTQTIFLKYPQEKNNGPKVPVELRVNIWLGLSAVEKKFNSFAEGTFTVFAEMYENQALMFGKWGTSGLVGRHKFSDVTGKIKLKREFFLPPKGWEWEGEWIVDPERSLLTEADAGHTEFTDEVYQNESRYPGGDWKPAEDTYTDANGDKAASPSELTCPPGWEWEDDAWSYDINRAVDEKGWEYGITIPPDHKPKSWVAAEKMYHTHRRRRLVRKRKKDLTQTASSTARAMEELQDQEGWEYASLIGWKFHWKQRSSDTFRRRRWRRKMAPSETHGAAAIFKLEGALGADTTEDGDEKSLEKQKHSATTVFGANTPIVSCNFDRVYIYHLRCYVYQARNLLALDKDSFSDPYAHICFLHRSKTTEIIHSTLNPTWDQTIIFDEVEIYGEPQTVLQNPPKVIMELFDNDQVGKDEFLGRSIFSPVVKLNSEMDITPKLLWHPVMNGDKACGDVLVTAELILRGKDGSNLPILPPQRAPNLYMVPQGIRPVVQLTAIEILAWGLRNMKNFQMASITSPSLVVECGGERVESVVIKNLKKTPNFPSSVLFMKVFLPKEELYMPPLVIKVIDHRQFGRKPVVGQCTIERLDRFRCDPYAGKEDIVPQLKASLLSAPPCRDIVIEMEDTKPLLASKLTEKEEEIVDWWSKFYASSGEHEKCGQYIQKGYSKLKIYNCELENVAEFEGLTDFSDTFKLYRGKSDENEDPSVVGEFKGSFRIYPLPDDPSVPAPPRQFRELPDSVPQECTVRIYIVRGLELQPQDNNGLCDPYIKITLGKKVIEDRDHYIPNTLNPVFGRMYELSCYLPQEKDLKISVYDYDTFTRDEKVGETIIDLENRFLSRFGSHCGIPEEYCVSGVNTWRDQLRPTQLLQNVARFKGFPQPILSEDGSRIRYGGRDYSLDEFEANKILHQHLGAPEERLALHILRTQGLVPEHVETRTLHSTFQPNISQGKLQMWVDVFPKSLGPPGPPFNITPRKAKKYYLRVIIWNTKDVILDEKSITGEEMSDIYVKGWIPGNEENKQKTDVHYRSLDGEGNFNWRFVFPFDYLPAEQLCIVAKKEHFWSIDQTEFRIPPRLIIQIWDNDKFSLDDYLGFLELDLRHTIIPAKSPEKCRLDMIPDLKAMNPLKAKTASLFEQKSMKGWWPCYAEKDGARVMAGKVEMTLEILNEKEADERPAGKGRDEPNMNPKLDLPNRPETSFLWFTNPCKTMKFIVWRRFKWVIIGLLFLLILLLFVAVLLYSLPNYLSMKIVKPNV

SEQ ID NO: 182 - DNA, 1814 bp, Homo sapiens
ctgggaaggggacccacccgagggtccagccaccagccccctcactaatagcggccaccccggcagcggcggcagcagcagcagcgacgcagcggcgacagctcagagcagggaggccgcgccacctgcgggccggccggagcgggcagccccaggccccctccccgggcacccgcgttcatgcaacgcctggtggcctgggacccagcatgtctccccctgccgccgccgccgcctgcctttaaatccatggaagtggccaacttctactacgaggcggactgcttggctgctgcgtacggcggcaaggcggcccccgcggcgccccccgcggccagacccgggccgcgcccccccgccggcgagctgggcagcatcggcgaccacgagcgcgccatcgacttcagcccgtacctggagccgctgggcgcgccgcaggccccggcgcccgccacggccacggacaccttcgaggcggctccgcccgcgcccgcccccgcgcccgcctcctccgggcagcaccacgacttcctctccgacctcttctccgacgactacgggggcaagaactgcaagaagccggccgagtacggctacgtgagcctggggcgcctgggggccgccaagggcgcgctgcaccccggctgcttcgcgcccctgcacccaccgcccccgccgccgccgccgcccgccgagctcaaggcggagccgggcttcgagcccgcggactgcaagcggaaggaggaggccggggcgccgggcggcggcgcaggcatggcggcgggcttcccgtacgcgctgcgcgcttacctcggctaccaggcggtgccgagcggcagcagcgggagcctctccacgtcctcctcgtccagcccgcccggcacgccgagccccgctgacgccaaggcgcccccgaccgcctgctacgcgggggccgcgccggcgccctcgcaggtcaagagcaaggccaagaagaccgtggacaagcacagcgacgagtacaagatccggcgcgagcgcaacaacatcgccgtgcgcaagagccgcgacaaggccaagatgcgcaacctggagacgcagcacaaggtcctggagctcacggccgagaacgagcggctgcagaagaaggtggagcagctgtcgcgcgagctcagcaccctgcggaacttgttcaagcagctgcccgagcccctgctcgcctcctccggccactgctagcgcggcccccgcgcgcgtccccctgccggccggggctgagactccggggagcgcccgcgcccgcgccctcgcccccgcccccggcggcgccggcaaaactttggcactggggcacttggcagcgcggggagcccgtcggtaattttaatattttattatatatatatatctatatttttgtccaaaccaaccgcacatgcagatggggctcccgcccgtggtgttatttaaagaagaaacgtctatgtgtacagatgaatgataaactctctgcttctccctctgcccctctccaggcgccggcgggcgggccggtttcgaagttgatgcaatcggtttaaacatggctgaacgcgtgtgtacacgggactgacgcaacccacgtgtaactgtcagccgggccctgagtaatcgcttaaagatgttcctacgggcttgttgctgttgatgttttgttttgttttgttttttggtctttttttgtattataaaaaataatctatttctatgagaaaagaggcgtctgtatattttgggaatcttttccgtttcaagcattaagaacacttttaataaacttttttttgagaatggtt

SEQ ID NO: 183 - protein, 345 aa, Homo sapiens
MQRLVAWDPACLPLPPPPPAFKSMEVANFYYEADCLAAAYGGKAAPAAPPAARPGPRPPAGELGSIGDHERAIDFSPYLEPLGAPQAPAPATATDTFEAAPPAPAPAPASSGQHHDFLSDLFSDDYGGKNCKKPAEYGYVSLGRLGAAKGALHPGCFAPLHPPPPPPPPPAELKAEPGFEPADCKRKEEAGAPGGGAGMAAGFPYALRAYLGYQAVPSGSSGSLSTSSSSSPPGTPSPADAKAPPTACYAGAAPAPSQVKSKAKKTVDKHSDEYKIRRERNNIAVRKSRDKAKMRNLETQHKVLELTAENERLQKKVEQLSRELSTLRNLFKQLPEPLLASSGHC

SEQ ID NO: 184 - DNA, 510 bp, Homo sapiens
  misc_feature 4, 34: n = A,T,C or G
tttngggaagccttggcaaacctccggggactgngagaggaggagaggagcgagaaggctatgcttcgctcccgcattgaagagcagtcccagctcatctgcatcctgaagcggaggtcagatgaggccctggagcgctgccagatcctagagctgctcaatgcagagctggaggagaagatgatgcaggaggctgagaagctcaaggcccagggtgagtacagtcggaaactagaggaacgctttatgaccctagcagccaaccacgagttgatgctccgcttcaaggatgaatacaagagtgagaacatcaagctgagggaggagaatgagaagctgaggctggagaatagcagcctcttcagccaggctctgaaggatgaggaggcgaaagtattacagctcacagtccggtgtgaggccctcactggggagctagaaacgctgaaggagaggtgtgctcaggatgcctgccaggcacaggcgcgcgagaaggagctgctggagcta

SEQ ID NO: 185 - DNA, 507 bp, Homo sapiens
ggcgactcccgctcgtgccccggagtcaccgccgtccgcggatccggcgctagtagcggggcctgccgaggaagccgagtgcccgccgccgcgccagcctcagcccgcgcagaatgtgctcgctgccccgcggcttcgagccccaagctcccgaggacttggcgcagcggagtttggtggagctgcgggaaatgttgaagcgccaggagagacttttgcgcaacgaaaaattcatttgcaaattgcccgacaaaggtaaaaagatctttgactcttttgccaaactgaaagctgctattgcagaatgtgaagaagttagaagaaaaagtgaactgtttaaccctgttagtttagactgtaagctaaggcaaaaagcaattgcagaagttgatgtgggtacagataaggcccagaattctgacccgatacttgatacttcatcactagttcctggatgttcctctgtagataacatcaagtcatctcaaacctcacaaaaccagggac

SEQ ID NO: 186 - DNA, 507 bp, Homo sapiens
cagttgccaccttcctctatgcggaggtctttgttgtgttgcttctctgcattcccttcatttctcctaaaagatggcagaagattttcaagtcccggctggtggagttgttagtgtcctatggcaacaccttctttgtggttctcattgtcatccttgtgctgttggtcatcgatgccgtgcgcgaaattcggaagtatgatgatgtgacggaaaaggtgaacctccagaacaatcccggggccatggagcacttccacatgaagcttttccgtgcccagaggaatctctacattgctggcttttccttgctgctgtccttcctgcttagacgcctggtgactctcatttcgcagcaggccacgctgctggcctccaatgaagcctttaaaaagcaggcggagagtgctagtgaggcggccaagaagtacatggaggagaatgaccagctcaagaagggagctgctgttgacggaggcaagttggatgtcgggaatgctgaggtga

SEQ ID NO: 187 - DNA, 508 bp, Homo sapiens
  misc_feature 1, 9, 19, 30, 37, 45, 46, 50, 51, 53, 56, 60, 64, 66, 68,69, 72, 76, 78, 87, 88, 89, 91, 99, 101, 105, 115, 118,125, 128, 152, 162, 167, 195, 205, 233, 240, 250, 258, 261,267, 275, 286, 295, 301, 307, 309, 319, 321, 322, 325, 326: n = A,T,C or G
  misc_feature 353, 362, 418, 434, 438, 450, 484, 485, 487, 495, 505: n = A,T,C or G
ngcagactntggatcccgncgacgtgggcnacaacantgttatcnntgcnntnganctgnagantncnnttnagancnactacgccnnngnacagtctnangtgnactgtgaggnggntgaatgnctnctgatggacgctccaatgctcatngtctgcaacnaacantgtcaaacaaatactctgacgcttttgncacaaatganctatgaacatgccgagatcacctgcccnaagaatntctgtacgcnggtgtacnctntctgangatgcgtnctatacatccntgctggacnatgtcncccctnanctggtgctcnannatnngtgcatcctctgctctggaactgcggntagcctgtntgaccgttcacgtgactcacacaaaggacggtggcttgtgacgaagtgtgaattantgcttgaagggatgtnaccnatcctgacctgnacaacaacactccaaacaagataatcctgggctnntnttgaaaanggcttcaaanttt

SEQ ID NO: 188 - DNA, 508 bp, Homo sapiens
  misc_feature 3, 9, 12, 16, 17, 33, 48, 50, 54, 60, 61, 67, 69, 74, 83,89, 90, 91, 129, 133, 146, 170, 239, 240, 258, 262, 284,285, 287, 290, 292, 293, 307, 309, 310, 312, 314, 315, 437,455: n = A,T,C or G
ggnacactntgntccnngtcgacctggcctagnacaatgtcctcattnanatcnacctgnngaagcncnttacnacccactangtcccnnnaaagtctgatgtttactgtgaggtgtgtgaattcctgntganggaggtgaccaanctgattgacaacaacaagactganaaagaaatactcgacgcttttgacaaaatgtgctcgaagctgccgaagtccctgtcggaagagtgccannaggtggtggacacgtacngcanctccatcctgtccatcctgctnnangangnnatccctcagctggngnncnanntgctgcacctctgctctggcacgcggctgcctgcactgaccgttcacgtgactcagccaaaggacggtggcttctgcgaagtgtgcaagaagctggtgggttatttggatcgcaacctgganaaaaacaccaccaagcangagatcctggctgctcttgagaaaggctgcagcttcctgccagacccttacca

SEQ ID NO: 189 - DNA, 507 bp, Homo sapiens
gctacttcaagctcatgtttgaccgctccgaggtctatggccccatgaagaactacctgaagaagcaggtcacacccctcttcattcacttcagaaataataccaacaactggagggagatcccagaaaacctgatggaccagtacagcgaggttaatgccatcagcaccgcctgctccaacggagttccagagtgtgaggagatggtctctggccttttcaagcagtggatggagaaccccaataataacccgatccaccccaacctgcggtccaccgtctactgcaacgctatcgcccagggcggggaggaggagtgggacttcgcctgggagcagttccgaaatgccacactggtcaatgaggctgacaagctccgggcagccctggcctgcagcaaagagttgtggatcctgaacaggtacctgagctacaccctgaacccggacttaatccggaagcaggacgccacctctaccatcatcagcattaccaacaacgtcattg

SEQ ID NO: 190 - DNA, 509 bp, Homo sapiens
cctccaagaatgtcatccctgccctggaactggtggagcccattaagaagcacgaggtcccagcaaagtctgatgtttactgtgaggtgtgtgaattcctggtgaaggaggtgaccaagctgattgacaacaacaagactgagaaagaaatactcgacgcttttgacaaaatgtgctcgaagctgccgaagtccctgtcggaagagtgccaggaggtggtggacacgtacggcagctccatcctgtccatcctgctggaggaggtcagccctgagctggtgtgcagcatgctgcacctctgctctggcacgcggctgcctgcactgaccgttcacgtgactcagccaaaggacggtggcttctgcgaagtgtgcaagaagctggtgggttatttggatcgcaacctggagaaaaacagcaccaagcaggagatcctggctgctcttgagaaaggctgcagcttcctgccagacccttaccagaagcagtgtgatcagtttgtggcagag

SEQ ID NO: 191 - DNA, 455 bp, Homo sapiens
tggaagccaaggcagctgccttcgagaagcaggtcctgcagctgcaggcgtcccacagggagagtgaggaggccctgcagaagcgcctggacgaggtcagccgggagctgtgccacacgcagagcagccacgccagcctccgggcggatgccgagaaggcccaggagcaacagcagcagatggccgagctgcacagcaagttacagtcctccgaggcggaggtgcgcagcaaatgcgaggagctgagtggcctccacgggcagctccaggaggccagggcggagaactcccagctcacagagagaatccgttccattgaggccctgctggaggcgggccaggcgcgggatgcccaggacgtccaggccagccaggcggaggctgaccagcagcagactcgcctcaaggagctggagtcccaggtgtcgggtctggagaaggaggccatcgagctc

SEQ ID NO: 192 - DNA, 456 bp, Homo sapiens
  misc_feature 257, 287, 295, 298, 316, 328, 340, 348, 349, 352, 353, 354,356, 372, 374, 382, 386, 391, 398, 400, 406, 408, 422, 427,429, 435, 448: n = A,T,C or G
aacagactgaagattctttagcaagtgaacgtgatcgtttaacaagtaaagaagaggaacttaaggatatacagaatatgaatttcttattaaaagctgaagtgcagaaattacaggccctggcaaatgagcaggctgctgctgcacatgaattggagaagatgcaacaaagtgtttatgttaaagatgataaaataagattgctggaagagcaactacaacatgaaatttcaaacaaaatggaagaatttaagatnctaaatgaccaaaacaaagcattaaaatcntaagttcngangctacagactcttgtttntgaacagcctantaaggatgttgnggaacaannggnnnantgcattcaagacaaanangagaagtntganactgnggaagantnacctcnangctgtcttattcangtggncnggtacntggacaaggaagntccttgga

SEQ ID NO: 193 - DNA, 417 bp, Homo sapiens
  misc_feature 141, 144, 146, 155, 160, 171, 184, 192, 194, 195, 205, 230,241, 277, 281, 288, 307, 313, 320, 323, 326, 331, 344, 349,360, 383, 385, 400, 405, 416: n = A,T,C or G
ggactcaagaggctgaccagtatgctgatgagaaaaccaaagacgtaccatttttcgaaggacttgaggggtctatagacacaggcataacagtcagtcgggaaaaggtcactgaagttgcccttaaaggtgaagggacanaanangctgaatgnaaaanggatgatgctnttgaactgcagantcacgctnanncttcttcatnccccgtggagagagagatggtagtntaagctcgatngggaggaaagaagctgctgcatccaacccatgtgantgangagaagnttgagcacaagacaactgntaccgnatctgangangtnagtangcagctgctccanacagngaatgtgcccntcatagatggggcaaaggatgtnancaacctgtaaggatnccctnctccctgcctng

SEQ ID NO: 194 - DNA, 502 bp, Homo sapiens
gtccggacttgcccacagcctcaaggaggagacggcgaggcccggcccccgctgtccctggtgtaaagaagtcgccgtagccgtcgcggccgggactccccgggctctcgcccttcaggtttcgttgacactcaggaccgtacgtacgctgcgccatgttcaagaaactgaagcaaaagatcagcgaggagcagcagcagctccagcaggcgctggctcctgctcaggcgtcctccaattcttcaacaccaacaagaatgaggagcaggacatcttcatttacagagcaacttgatgaaggtacacccaatagagagtcaggtgacacacagtcttttgcacagaagctccagctccgggtgccctccgtggagtctttgtttcgaagtccgataaaggaatctctattccggtcttcttctaaagagtctttggtacgaacatcttccagagaatccctgaatcgacttgacctggacagttctactgccagttttgatcc

SEQ ID NO: 195 - DNA, 457 bp, Homo sapiens
gaaatctgggactaaaaaactgaagaccgaaactgacaaagaaaatgctgaagtgaagtttaaagattttcttctgtccttgaagactatgatgttttctgaagatgaggctctttgtgttgtagacttgctaaaggagaagtctggtgtaatacaagatgctttaaagaagtcaagtaagggagaattgactacgcttatacatcagcttcaagaaaaggacaagttactcgctgctgtgaaggaagatgctgctgctacaaaggatcggtgtaagcagttaacccaggaaatgatgacagagaaagaaagaagcaatgtggttataacaaggatgaaagatcgaattggaacattagaaaaggaacataatgtatttcaaaacaaaatacatgtcagttatcaagagactcaacagatgcagatgaagtttcagcaagttcgtgagcagatggag

SEQ ID NO: 196 - DNA, 504 bp, Homo sapiens
  misc_feature 361, 366, 382, 392, 401, 405, 429, 444: n = A,T,C or G
ccgacatatgcaagaactatatcagccagtattctgaaattgctatccagatgatgatgcacatgcaacccaaggagatctgtgcgctggttgggttctgtgatgaggtgaaagagatgcccatgcagactctggtccccgccaaagtggcctccaagaatgtcatccctgccctggaactggtggagcccattaagaagcacgaggtcccagcaaagtctgatgtttactgtgaggtgtgtgaattcctggtgaaggaggtgaccaagctgattgacaacaacaagactgagaaagaaatactcggcgcttttgacaaaatgtgctcgaagctgcgaagtccctgtcggaagaatgccangaagnggtggacacgtacggnagcttccatnctgtccatnctgnttggaaggaaggtcaacccttgancctggtggtggcaancaatgcttggcacccttcttgcttcttgggcaccgccggggttggccttgcaccttgacc

SEQ ID NO: 197 - DNA, 750 bp, Homo sapiens
  misc_feature 727, 744: n = A,T,C or G
agaagcacgaggtcccagcaaagtctgatgtttactgtgaggtgtgtgaattcctggtgaaggaggtgaccaagctgattgacaacaacaagactgagaaagaaatactcgacgcttttgacaaaatgtgctcgaagctgccgaagtccctgtcggaagagtgccaggaggtggtggacacgtacggcagctccatcctgtccatcctgctggaggaggtcagccctgagctggtgtgcagcatgctgcacctctgctctggcacgcggctgcctgcactgaccgttcacgtgactcagccaaaggacggtggcttctgcgaagtgtgcaagaagctggtgggttatttggatcgcaacctggagaaaaacagcaccaagcaggagatcctggctgctcttgagaaaggctgcagcttcctgccagacccttaccagaagcagtgtgatcagtttgtggcagagtacgagcccgtgctgatcgagatcctggtggaggtgatggatccttccttcgtgtgcttgaaaattggagcctgcccctcggcccataagcccttgttgggaactgagaagtgtatatggggcccaagctactggtgccagaacacagagacagcagcccagtgcaatgctgtcgagcattgcaaacgccatgtgtggaactaggaggaggaatattccatcttggcagaaaccacagcattggtttttttctacttgggtgnctgggggaatgaacgcncagatc

SEQ ID NO: 198 - DNA, 722 bp, Homo sapiens
  misc_feature 25, 44, 289, 356, 446, 497, 524, 539, 557, 673, 681, 683,705, 707, 709: n = A,T,C or G
gccatccatatttatttgaaaaggncaaaaggagcatctatganacaagggaggggtgcaggctgaagcagcgcctcaacagccagggacatgtaggcaacacgagcaggcacagcgcggccaccactgtccacacgctcacacaagccaggcccgcagggccttcggagagctagcaggttacattcaggcagatggccctcttcccacccaaacccacagaaccccaaacaaggcatcaccaggaaagacacgggaaagccaaatcacagttgaaccagggacaganaacccttggccccactgatgtcccaagccaccagcagctgcttccaaaatccctatgctattacagngggaattacatcatttaaaaagcctgattattccaggcttctaatctttcatataaaactgcctttgttttgctgctttgttcaactganaggcccaggaaagcggggagggtccctgatcagggcaggaggccacctcanaagcccaggcccaccagtgcccaagcncatgtcagggctcanaacaaggcctcaaccaanagggttgatggcctccagtcaagaaactgtggctcatgccagcagagctctctcctcctccagcaggcgccatgcaaggggcaggctaaaagacctccagtgcatcaacatccatntagcagananaaaaggggcactgaagcagctntntntgccaaggggctc

SEQ ID NO: 199 - DNA, 504 bp, Homo sapiens
  misc_feature 408, 439, 444, 459, 460, 481, 484: n = A,T,C or G
cctccaagaatgtcatccctgccctggaactggtggagcccattaagaagcacgaggtcccagcaaagtctgatgtttactgtgaggtgtgtgaattcctggtgaaggaggtgaccaagctgattgacaacaacaagactgagaaagaaatactcgacgcttttgacaaaatgtgctcgaagctgccgaagtccctgtcggaagagtgccaggaggtggtggacacgtacggcagctccatcctgtccatcctgctggaggaggtcagccctgagctggtgtgcagcatgctgcacctctgctctggcacgcggctgcctgcactgaccgttcacgtgactcagccaaaggacggtggcttctgcgaagtgtgcaagaagctggtgggttatttggatcgcaacctgnagaaaaacagcaccaagcacgagatcctggnttgtnttgagaaaggctgcnncttctgccagacccttaccanaancagtgtgatcagtttgtggc

SEQ ID NO: 200 - DNA, 506 bp, Homo sapiens
aggtggtggcccccttcatggccaacatccctctcctcctctaccctcaggacggcccccgcagcaagccccagccaaaggataatggggacgtttgccaggactgcattcagatggtgactgacatccagactgctgtacggaccaactccacctttgtccaggccttggtggaacatgtcaaggaggagtgtgaccgcctgggccctggcatggccgacatatgcaagaactatatcagccagtattctgaaattgctatccagatgatgatgcacatgcaacccaaggagatctgtgcgctggttgggttctgtgatgaggtgaaagagatgcccatgcagactctggtccccgccaaagtggcctccaagaatgtcatccctgccctggaactggtggagcccattaagaagcacgaggtcccagcaaagtctgatgtttactgtgaggtgtgtgaattctggtgaaggaggtgaccaagctgattgacaacaacaaagact

SEQ ID NO: 201 - DNA, 507 bp, Homo sapiens
agaaaatggaaagtcaagggattatgaaaaataaggaaattcaagagctcgagcagttattaagttctgaaaggcaagagcttgactgccttaggaagcagtatttgtcagaaaatgaacagtggcaacagaagctgacaagcgtgactctggagatggagtccaagttggcggcagaaaagaaacagacggaacaactgtcacttgagctggaagtagcacgactccagctacaaggtctggacttaagttctcggtctttgcttggcatcgacacagaagatgctattcaaggccgaaatgagagctgtgacatatcaaaagaacatacttcagaaactacagaaagaacaccaaagcatgatgttcatcagatttgtgataaagatgctcagcaggacctcaatctagacattgagaaaataactgagactggtgcagtgaaacccacaggagagtgctctggggaacagtccccagatccaattatgagcctccaggggaaga

SEQ ID NO: 202 - DNA, 517 bp, Homo sapiens
  misc_feature 233, 330, 439, 461, 500: n = A,T,C or G
aaagttccaaaacattctttaatgaaaagatttttggcacggggaggctggggagaggctgcccccaggcctggctgggtggccccagtgcaggctcggcctcagcggcggctaccactcacgtggtggtgatggagcaggtcatctccatcctcatcctcgtcgtcctcaaccacagtcactgagcgcaccagcttgcgcatggccacttcttccccagtggagttgatganagccgtacgcaggctgttcccgcagccccaggtgttctgtgccttccacaccaggtcggtaggggggctgtgggtggccccagctcctgcagcccanatcgtcaccacctgcccagccttcagggtgaactttggtgggaaccggtaagtcagcaagggatcatctccattctggcgcttgatctgccaattgcccatggactggncctcattggacttgttgcgcanccggacaaacttgccctcctcgtccacctcctccacggncacgcgcccgctagtgc

SEQ ID NO: 203 - DNA, 505 bp, Homo sapiens
  misc_feature 441, 443: n = A,T,C or G
ctgacatccagactgctgtacggaccaactccacctttgtccaggccttggtggaacatgtcaaggaggagtgtgaccgcctgggccctggcatggccgacatatgcaagaactatatcagccagtattctgaaattgctatccagatgatgatgcacatgcaacccaaggagatctgtgcgctggttgggttctgtgatgaggtgaaagagatgcccatgcagactctggtccccgccaaagtggcctccaagaatgtcatccctgccctggaactggtggagcccattaagaagcacgaggtcccagcaaagtctgatgtttactgtgaggtgtgtgaattcctggtgaaggaggtgaccaagcttgattgacaacaacagactgagaaagaaatactcgacgctttttgacaaaatgtggttcgaaagcttgccgaantnccttgtcggaaagaagtgcccaggaaggtgggtgggacacgtacggcagcttccatccttgt

SEQ ID NO: 204 - DNA, 505 bp, Homo sapiens
aggtggtggcccccttcatggccaacatccctctcctcctctaccctcaggacggcccccgcagcaagccccagccaaaggataatggggacgtttgccaggactgcattcagatggtgactgacatccagactgctgtacggaccaactccacctttgtccaggccttggtggaacatgtcaaggaggagtgtgaccgcctgggccctggcatggccgacatatgcaagaactatatcagccagtattctgaaattgctatccagatgatgatgcacatgcaacccaaggagatctgtgcgctggttgggttctgtgatgaggtgaaagagatgcccatgcagactctggtccccgccaaagtggcctccaagaatgtcatccctgccctggaactggtggagcccattaagaagcacgaggtcccagcaaagtctgatgtttactgtgaggtgtgtgaattcctggtgaaggaggtgaccaagctgattgacaacaacaagac

SEQ ID NO: 205 - DNA, 141 bp, Homo sapiens
ccccggtgagcggcgtgcgcagggaaggcgctcggggcggcggccgtggccgggggcggtggaagcaggcgggccggggcggcggcgtctgtggccgtggccggggccggggccgtggccggggacggggacggggccggg

SEQ ID NO: 206 - DNA, 507 bp, Homo sapiens
ccgacatatgcaagaactatatcagccagtattctgaaattgctatccagatgatgatgcacatgcaacccaaggagatctgtgcgctggttgggttctgtgatgaggtgaaagagatgcccatgcagactctggtccccgccaaagtggcctccaagaatgtcatccctgccctggaactggtggagcccattaagaagcacgaggtcccagcaaagtctgatgtttactgtgaggtgtgtgaattcctggtgaaggaggtgaccaagctgattgacaacaacaagactgagaaagaaatactcgacgcttttgacaaaatgtgctcgaagctgccgaagtccctgtcggaagagtgccaggaggtggtggacacgtacggcagctccatcctgtccatcctgctggaggaggtcagccctgagctggtgtgcagcatgctgcacctctgctctggcacgcggctgcctgcactgaccgttcacgtgactcagccaaaggacggtg

SEQ ID NO: 207 - DNA, 506 bp, Homo sapiens
  misc_feature 466, 484, 492, 494, 506: n = A,T,C or G
gaaagaatgcaccaggggctcggcagtgtggtgccagaatgtgaagacggcgtccgactgcggggcagtgaagcactgcctgcagaccgtttggaacaagccaacagtgaaatcccttccctgcgacatatgcaaagacgttgtcaccgcagctggtgatatgctgaaggacaatgccactgaggaggagatccttgtttacttggagaagacctgtgactggcttccgaaaccgaacatgtctgcttcatgcaaggagatagtggactcctacctccctgtcatcctggacatcattaaaggagaaatgagccgtcctggggaggtgtgctctgctctcaacctctgcgagtctctccagaagcacctagcagagctgaatcaccagaagcaggtggagtccaataagatcccagagctggacatgactgaggtggtggcccccttcatggccaacatccctctnctcctataccctcagganggaccccncnttaacttcccan

SEQ ID NO: 208 - DNA, 506 bp, Homo sapiens
  misc_feature 487: n = A,T,C or G
cagcaaagtctgatgtttactgtgaggtgtgtgaattcctggtgaaggaggtgaccaagctgattgacaacaacaagactgagaaagaaatactcgacgcttttgacaaaatgtgctcgaagctgccgaagtccctgtcggaagagtgccaggaggtggtggacacgtacggcagctccatcctgtccatcctgctggaggaggtcagccctgagctggtgtgcagcatgctgcacctctgctctggcacgcggctgcctgcactgaccgttcacgtgactcagccaaaggacggtggcttctgcgaagtgtgcaagaagctggtgggttatttggatcgcaacctggagaaaaacagcaccaagcaggagatcctggctgctcttgagaaaggctgcagcttcctgccagacccttaccagaagcagtgtgatcaagtttgtggcagagtacgaacccgtgctgatcgagatccttggtgggaagnggatggatccttccttcgt

SEQ ID NO: 209 - DNA, 474 bp, Homo sapiens
  misc_feature 213, 255, 260, 310, 422, 451, 454, 456, 467: n = A,T,C or G
agctgcgcctgacagtactctgtgcaaaaaacctggtgaaaaaggattttttccgacttcctgatccatttgctaaggtggtggttgatggatctgggcaatgccattctacagatactgtgaagaatacgcttgatccaaagtggaatcagcattatgacctgtatattggaaagtcttgattcagttacgatcagtgtatggaatcacaanaagatccataagcaaacaaggtgctggatttctcggttgtgntcgtnttctttccaatgccatcaaccgcctcaaagacactggttatcagaggttnggatttatgcaaactcgggccaaatgacaatgatacagttagaggacagatagtagtaagtcttcagtccagagaccgaataggccagggaggacaaagtggggactgcagngcgtttatttgattacgatttaccaaacnggntnggaagaacggncaacccg

SEQ ID NO: 210 - DNA, 597 bp, Homo sapiens
  misc_feature 4, 5, 89, 130, 141, 181, 200, 231, 246, 306, 319, 326, 332,356, 401, 406, 411, 414, 417, 433, 436, 462, 490, 508, 521,524, 554, 560, 573, 581, 589, 596: n = A,T,C or G
aaannattcagtctaacaaggattaagaaaagacaaaactctgttcagtgtttctgacaaagtagaaagggtgaaaacataaataaggntttaatttggcaaaatataatacaatgccttttttatcctnaaatgaacagnttcccaattacttcactctaacacctggtagggctctttntcctttgtgagctgttggnttaccgcctgaagcaactgctgtaactgtgnaacagtctgatttanacttacagacattgtctccttctcagaagactccgtttctggggaaacatcactattttnaataacatgtagngtctccngcagcntttactatttttgactggataagntccagtgactgttgagccttatgcaaatcaccagctaccttctgnctttnatttnggncanactaagttgtgtgagngtntcatttaactgtgccttcaacaaatntagctcttcattctgcttactgcttcanaatatgaatcatcaagtnttttctgcgattnagncaacagatctttcagctctctgacttctgnaacagnaggtatgatcggnccatcctntgcctttnctaggtnc

SEQ ID NO: 211 - DNA, 505 bp, Homo sapiens
  misc_feature 461, 494, 501: n = A,T,C or G
gagaaagggtggaatcggtggtgatcaaaaaccttaagaagacacccaactttccaagttctgttctcttcatgaaagtgttcttgcccaaggaggaattgtacatgcccccactggtgatcaaggtcatcgaccacaggcagtttgggcggaagcctgtcgtcggccagtgcaccatcgagcgcctggaccgctttcgctgtgacccttatgcagggaaagaggacatcgtcccacagctcaaagcctcccttctgtctgccccaccatgccgggacatcgttatcgaaatggaagacaccaaaccattactggcttctaagctgacagaaaaggaggaagaaatcgtggactggtggagtaaattttatgcttcctcaggggaacatgaaaaatgcggacagtatattcagaaaggctattccaagctcaagatatataattgtgaactagaaaatgtncagaatttgagggcctgacagacttctcagatncttcaanttgt

SEQ ID NO: 212 - DNA, 506 bp, Homo sapiens
  misc_feature 488: n = A,T,C or G
ccagccccgccgcgatgcccgcgcgcccaggacgcctcctcccgctgctggcccggccggcggccctgactgcgctgctgctgctgctgctgggccatggcggcggcgggcgctggggcgcccgggcccaggaggcggcggcggcggcggcggacgggccccccgcggcagacggcgaggacggacaggacccgcacagcaagcacctgtacacggccgacatgttcacgcacgggatccagagcgccgcgcacttcgtcatgttcttcgcgccctggtgtggacactgccagcggctgcagccgacttggaatgacctgggagacaaatacaacagcatggaagatgccaaagtctatgtggctaaagtggactgcacggcccactccgacgtgtgctccgcccagggggtgcgaggataccccaccttaaagcttttcaagccaggccaagaagctgtgaagtaccagggtcctcgggacttccanacacttggaaaacttgga

SEQ ID NO: 213 - DNA, 506 bp, Homo sapiens
  misc_feature 164, 490: n = A,T,C or G
agcaagttcaacagagtttggaaaagatttctaaactggagcaggaaaaagaacattggatgttggaagcacaattagccaaaatcaagctagagaaagaaaaccagcgaattgcagataagctgaagaatacaggtagtgcccagctggttgggctggcccangaaaatgctgctgtgtcaaatactgctggccaggatgaagccacagctaaggctgtgttggagcccattcagagcaccagtctaattgggactttaaccaggacatctgacagtgaggttccagatgtggaatctcgtgaagacttaattaaaaatcactacatggcaaggatagtggaacttacgtctcagttgcagctggctgacagtaagtcagtgcatttttatgcccgagtgccgagcactgtctaaaagactggccttggctgaaaagtctaaggaagcattgacagaagaaatgaaacttgccagtcagaacatcagcnggacttcaggtgagct

SEQ ID NO: 214 - DNA, 506 bp, Homo sapiens
  misc_feature 236, 299, 366, 381, 394, 399, 405, 408, 417, 418, 428, 433,445, 449, 452, 453, 458, 473, 475, 482, 484, 490, 496, 497: n = A,T,C or G
gcgagcttcctgcagacggtgcagaaatttgcggagcacagcgtgcgtaagcggggccacattgacttcatctacctggccctgcgcaagatgcgggagtatggtgtcgagcgggacctggctgtgtacaaccagctgctcaacatcttccccaaggaggtcttccggcctcgcaacatcatccagcgcatcttcgtccactaccctcggcaagcaaggagtgtgggattgctgtnctggagcagatggagaaccacggtgtgatgcccaacaaggagacggagttcctgctgattcanatctttggacgcaaaagctaccccatgctcaagttggtgcgccttgaagctgtggttccctcgattnatgaacgttaacccntttccagtgcccntgggnacttgnccncaggaatcnntgtgggaacnttggncctttttttgtncctngcnnggaanaatgggaacccttgnancttttantngcctanggggtnnaatccattt

SEQ ID NO: 215 - DNA, 634 bp, Homo sapiens
  misc_feature 518, 618: n = A,T,C or G
ccaagtttggggactacaacaaagaagtgcacaagtctgggtacctcagctctgagcggctgatccctcaaagagtgatggaccagcacaaacttaccagggaccagtgggaggaccggatccaggtgtggcatgcggaacaccgtgggatgctcaaagataatgctatgttggaatacctgaagattgctcaggacctggaaatgtatggaatcaactatttcgagataaaaaacaagaaaggaacagacctttggcttggagttgatgcccttggactgaatatttatgagaaagatgataagttaaccccaaagattggctttccttggagtgaaatcaggaacatctctttcaatgacaaaaagtttgtcattaaacccatcgacaagaaggcacctgactttgtgttttatgccccacgtctgagaatcaacaagcggatcctgcagctctgcatgggcaaccatgagttgtatatgcgccgcaggaagcctgacaccatcgaggtgcagcanatgaaggcccaggcccgggaggagaagcatcagaagcagctggagcggcaacagctggaaacagagaagaaaaggagagaaaccgtgggagagagagaangagcagatgatgccgc

SEQ ID NO: 216 - DNA, 593 bp, Homo sapiens
  misc_feature 24, 294, 381, 435, 473, 482, 504, 519, 528, 582: n = A,T,C or G
ggagaagattttatttcacaaggngaggaacccaggctggtggccgacgcccacacaccaggctccgggacgcatggggtctgcacgtggagagggtgctggccgccccagcaggaagcccgacgtaggtcccagcgtgtctgtcagtcatgctgctgccctgtggggctggagaggcaggacgtgcacccagcctgtggctggcggggcaggggacctgcaggtcaggccaagcagagtggctccggctatgcccccgagcctgcaggctacgccacggtctggcggctgaanagctcgagggtgagcgagctgaggaaggcagggatgctgtcctggcgccgcaggtgcacctcgatgagctcgcccacggtgtgtganaactctgtctccagtagctgcatcttggaacccgaggggctggtggccttgaanatgaggcagtcgcctgggtgctcggcgtacagcgaggncagccggtnctggttctccgtggtgatgtcnatctggtagccggtnagcgtgtancacggcctttgcggaactcctggatcttgggctggaaaacctccttgagccggntggtttttcac

SEQ ID NO: 217 - DNA, 694 bp, Homo sapiens
  misc_feature 668, 690: n = A,T,C or G
aggagctgcaggagcagctggacctgcaacacaaaaaatgccaggaagccaatcagaaaatccaggaactccaggccagccaagaagcaagagcagaccatgagcagcagattaaggatctggagcagaagctgtccctgcaagagcaggatgcagcgattgtgaagaacatgaagtctgagctggtacggctccctaggctggaacgggagctgaagcagctgcgggaggagagcgcgcacctgcgggagatgagagagaccaacgggctgctccaggaagagctggaagggctgcagaggaagctggggcgccaggagaagatgcaggagacgctggttggcttggagctggagaacgagaggctgctggccaagctgcaaagctgggagagactggaccagaccatgggcctgagcatcaggactccagaagacctttccagattcgtggttgagctgcagcagagggagcttgccttgaaggacaagaacagcgccgtcaccagcagcgcccgggggctggagaaggccaggcagcagctgcaggaggagctccggcaggtcagcggccagctgttggaggagaggaagaagcgcgagacccacgaggcgctggcccggaggctccagaaacgggtcctgctgctcaccaaggagcgggacggnattgcgggccatccttggggtnctac

SEQ ID NO: 218 - DNA, 507 bp, Homo sapiens
  misc_feature 399, 465: n = A,T,C or G
ccaaggtgatcataaacagcacaatcacaccgaatatgaccttcaccaaaacgtcacagaagtttgggcagtgggccgacagcagagccaacacagtgtttggtttggggttttcctctgagcagcagctgacaaagtttgcagagaaattccaggaggtgaaagaagctgccaagatagccaaagacaagacgcaggagaaaatcgagacctcaagtaatcattcccaagcatccagtgtcaacgggacggacgatgaaaaggcctctcacgccggtccagccaacacacacctgaagtctgagaatgacaagctgaagattgccttgacgcagagcgcagccaacgtgaagaagtgggagatcgagctgcagacccttcgggagagcaatgcacggnttgaccacagcacttgcaggagtcggcaagccagtgtgggagcagtggaagaagcagtttcttccntctgccgtggatgagaatgacccggcttccgcaccaagaatt

SEQ ID NO: 219 - DNA, 457 bp, Homo sapiens
aaataatgactgggaaaaaaagcttcacaatgctgtagcagaaatggaacaggaaaagtttgatcttcaaaagcaacacactgaaaacattcaagaattgcttgaggatacaaatgtgcgtctgaataaaatggagagtgaatacatggcgcaaacacagtccacaaaccacatgatcaaagaactggaggcccgtgtccagcagctgactggagaagcagagaacagtaatttacagaggcagaaattaattcaagaaaaagcagaacttgaaagatgttaccagataacgtgtagtgaattacaagaagtaaaggcaaggcgtaacacactgcataaagagaaggaccatcttgtaaatgattatgagcaaaacatgaaactgttacaaaccaaatatgatgctgatataaaccttctaaaacaagaacatgctctttcagcttctaaggcatct

SEQ ID NO: 220 - DNA, 183 bp, Homo sapiens
  misc_feature 138, 168, 173, 175, 178: n = A,T,C or G
ctgccctggaactggtggagcccattaagaagcacgaggtcccagcaaagtctgatgtttactgtgaggtgtgtgaattcctggtgaaggaggtgaccaatctgattgacaacaacaagactgagaaagaaatactcnacgcttttgacaaaatgtgctcgaagctgncgaantnccngtgca

SEQ ID NO: 221 - DNA, 507 bp, Homo sapiens
aattacagaagaacaaacagagactgcgaaacgatcctctcaatcaaaataagggtaaaccagacttgaatacaacattgccaattagacaaacagcatcaattttcaaacaaccggtaaccaaagtcacaaatcatcctagtaataaagtgaaatcagacccacaacgaatgaatgaacagccacgtcagcttttctgggagaagaggctacaaggacttagtgcatcagatgtaacagaacaaattataaaaaccatggaactacccaaaggtcttcaaggagttggtccaggtagcaatgatgagacccttttatctgctgttgccagtgctttgcacacaagctctgcgccaatcacagggcaagtctccgctgctgtggaaaagaaccctgctgtttggcttaacacatctcaacccctctgcaaagcttttattgtcacagatgaagacatcaggaaacaggaagagcgagtacagcaagtacgcaagaaattggaagaag

SEQ ID NO: 222 - DNA, 506 bp, Homo sapiens
  misc_feature 10, 466, 491, 503: n = A,T,C or G
gcaacctggngggggctgcccacgaggagctgcagcagtcgcgcatccgcatcgacagcctctctgcccagctcagccagctccagaagcagctggcagccaaggaggcgaagcttcgagacctggaggactcactggcccgtgagcgggacaccagccggcggctgctggcggaaaaggagcgggagatggccgagatgcgggcaaggatgcagcagcagctggacgagtaccaggagcttctggacatcaagctggccctggacatggagatccacgcctaccgcaagctcttggagggcgaggaggagaggctacgcctgtcccccagccctacctcgcagcgcagccgtggccgtgcttcctctcactcatcccagacacagggtgggggcagcgtcaccaaaaagcgcaaactggagtccactgagagccgcagcagcttctcacagcacgcacgcactancgggcgccgtggcccgtggaaggangtggatgagganggc

SEQ ID NO: 223 - DNA, 403 bp, Homo sapiens
  misc_feature 321, 340, 382, 386: n = A,T,C or G
ataatggggacgtttgccaggactgcattcagatggtgactgacatccagactgctgtacggaccaactccacctttgtccaggccttggtggaacatgtcaaggaggagtgtgaccgcctgggccctggcatggccgacatatgcaagaactatatcagccagtattctgaaattgctatccagatgatgatgcacatgcaggatcagcaacccaaggagatctgtgcgctggttgggttctgtgatgaggtgaaagagatgcccatgcagactctggtccccgccaaagtggcctccaagaatgtcatccctgccctgnaactggtggagcccattangaagcacgaggtcccagcaaagtctgatgattactgtgaggngtgngaattcctgctgaagga

SEQ ID NO: 224 - DNA, 149 bp, Homo sapiens
  misc_feature 98, 111, 116, 117, 125, 134, 138, 140, 145: n = A,T,C or G
gatgaggaggcggaggtcggcggtcgggtccgtctctgcccgcggctgtggcggcgccggcggatccagccttagcggttcctctctgggcggcggcngcggcggctcggntgacnnctcctccnccagctgancccncnggagnccag

SEQ ID NO: 225 - DNA, 472 bp, Homo sapiens
acgaactgagctgctacttacctcaagaaaaagacctgaaaatttctgtctatgattatgacacctttacccgggatgaaaaagtaggagaaacaattattgatctggaaaaccgattcctttcccgctttgggtcccactgcggcataccagaggagtactgtgtttctggagtcaatacctggcgagatcaactgagaccaacacagctgcttcaaaatgtcgccagattcaaaggcttcccacaacccatcctttccgaagatgggagtagaatcagatatggaggacgagactacagcttggatgaatttgaagccaacaaaatcctgcaccagcacctcggggcccctgaagagcggcttgctcttcacatcctcaggactcaggggctggtccctgagcacgtggaaacaaggactttgcacagcaccttccagcccaacatttcccagggaaaacttcagatgtg

SEQ ID NO: 226 - DNA, 473 bp, Homo sapiens
cagacaagtgcaatatgattaatggaacagatggagattcttttcacccactaataaccaaagatgaggtcctttatgtcttcccatctgacttttgcaggtcagtgtatattactttcagtgactatgagagtgtacagggactgcctgcctttcggtataaagttcctgcagaaatattagccaatacgtcagacaatgccggcttctgtatacctgagggaaactgcctgggctcaggagttctgaatgtcagcatctgcaagaatggtgcacccatcattatgtctttcccacacttttaccaagcagatgagaggtttgtttctgccatagaaggcatgcacccaaatcaggaagaccatgagacatttgtggacattaatcctttgactggaataatcctaaaagcagccaagaggttccaaatcaacatttatgtcaaaaaattagatgactttgttgaaacggga

SEQ ID NO: 227 - DNA, 473 bp, Homo sapiens
cagggggcacagaagcagaggcagttcctgcacagaaagagaggcctccagcaccttccagttttgtgttccaggaagaaactaaagaacaatcaaagatggaagacactctagagcatacagataaagaggtgtcagtggaaactgtatccattctgtcaaagactgaggggactcaagaggctgaccagtatgctgatgagaaaaccaaagacgtaccatttttcgaaggacttgaggggtctatagacacaggcataacagtcagtcgggaaaaggtcactgaagttgcccttaaaggtgaagggacagaagaagctgaatgtaaaaaggatgatgctcttgaactgcagagtcacgctaagtctcctccatcccccgtggagagagagatggtagttcaagtcgaaagggagaaaacagaagcagagccaacccatgtgaatgaagagaagcttgagcacgaaacagct

SEQ ID NO: 228 - DNA, 515 bp, Homo sapiens
  misc_feature 34, 47, 53, 66, 156, 212, 246, 264, 296, 298, 323, 375, 446,447, 464, 479, 510: n = A,T,C or G
taggagctcgccatccatatttatttgaaaaggncaaaaggagcatntatganacaagggaggggngcaggctgaagcagcgcctcaacagccagggacatgtaggcaacacgagcaggcacagcgcggccaccactgtccacacgctcacacaanccaggcccgcagggccttcggagagctagcaggttacattcaggcagatggccctnttcccacccaaacccacagaaccccaaacaaggnatcaccaggaaagacacnggaaagccaaatcacagttgaaccagggacananaacccttggccccactgatgtcccnagccaccagcagctgcttccaaaatccctatgctattacagggggaattacntcatttaaaaagcctgattattccaggcttctaatctttcatataaaactgcctttgttttgctgctttgnncaactgagaggcccacngaaagcggggagggnccctgatcagggcaggaggccacctcaaaancccag

SEQ ID NO: 229 - DNA, 697 bp, Homo sapiens
gcgcaagtaggtctacaagacgctacttcccctatcatagaagagcttatcacctttcatgatcacgccctcataatcattttccttatctgcttcctagtcctgtatgcccttttcctaacactcacaacaaaactaactaatactaacatctcagacgctcaggaaatagaaaccgtctgaactatcctgcccgccatcatcctagtcctcatcgccctcccatccctacgcatcctttacataacagacgaggtcaacgatccctcccttaccatcaaatcaattggccaccaatggtactgaacctacgagtacaccgactacggcggactaatcttcaactcctacatacttcccccattattcctagaaccaggcgacctgcgactccttgacgttgacaatcgagtagtactcccgattgaagcccccattcgtataataattacatcacaagacgtcttgcactcatgagctgtccccacattaggcttaaaaacagatgcaattcccggacgtctaaaccaaaccactttcaccgctacacgaccgggggtatactacggtcaatgctctgaaatctgtggagcaaaccacagtttcatgcccatcgtcctagaattaattcccctaaaaatctttgaaatagggcccgtatttaccctatagcaccccctctaccccctctagagcc

SEQ ID NO: 230 - DNA, 350 bp, Homo sapiens
  misc_feature 5, 17, 24, 56, 76, 83, 122, 178, 193, 203, 211, 227, 233,238, 259, 299, 315, 317, 325: n = A,T,C or G
ggctntaaagggggtanagggggngctatagggtaaatacgggccctatttcaaanatttttaggggaattaattntaggacnatgggcatgaaactgtggtttgctccacaaatttcaaancattgaccgtagtatacccccggtcgtgtagcggtgaaagtggtttggtttaaacntccgggaattgcatntgtttttaancctaatgnggggacagctcatgantgcaanacgtnttgtgatgtaattattatacnaatgggggcttcaatcgggagtactactcgattgtcaacntcaaggagtcgcaggncncctggttntaggaataatgggggaagtatgtac

SEQ ID NO: 231 - DNA, 473 bp, Homo sapiens
cccgcaccaacgagaaggtggagctgcaggagctgaatgaccgcttcgccaactacatcgacaaggtgcgcttcctggagcagcagaataagatcctgctggccgagctcgagcagctcaagggccaaggcaagtcgcgcctgggggacctctacgaggaggagatgcgggagctgcgccggcaggtggaccagctaaccaacgacaaagcccgcgtcgaggtggagcgcgacaacctggccgaggacatcatgcgcctccgggagaaattgcaggaggagatgcttcagagagaggaagccgaaaacaccctgcaatctttcagacaggatgttgacaatgcgtctctggcacgtcttgaccttgaacgcaaagtggaatctttgcaagaagagattgcctttttgaagaaactccacgaagaggaaatccaggagctgcaggctcagattcaggaacagcatgtccaaatc

SEQ ID NO: 232 - DNA, 676 bp, Homo sapiens
  misc_feature 596, 608, 641, 655, 667: n = A,T,C or G
aaaggtatcaaaggcctttattgatttaattttcctttcaacttatcaatgctatcacaaattctaaggaaacaggacttgggcaaaattttttattatgaagatacagatctaagaacagaaggataattatgtgctagcttatatatagttccttgtaaaaataatgatacatgaaaaattagtagaaaatgaaaatctgcagttatctgatatctgaaaatgttaagcaatttcccctgcatcttagttctaatcacttttgcagaataatcaagcatatttgggtgaagagagtatttaatgattccatttttattaatagtgtagtgtgcccttcagagcttggcgtagtctttaagaatcatctgaagtttctggctcagcatgatgttccctctggccttcagcctgccactaaagaatgccttctgagggtcaagcttgcccaggaccacctccatgaaatcttcatctgaaagtatgattgttgtatcagcagcaccttttgcagggccttggtacacttttccagaaccacttttcaggtcaatagtccacttagccccaatatttccgcctttggttatatgccnctcaaatacagnatttactttcttcaccacctcaggcccaatatnctttagggcggcgncctatttcctcnaataccaaa

SEQ ID NO: 233 - DNA, 137 bp, Homo sapiens
  misc_feature 34, 75, 128: n = A,T,C or G
taaaagaatcacccaatgactcctgaggcagcgnaatgctaactggaagaagatctgtgactttgagaatgccancaagcctcagagtatccaagaatcaactggcagtataattgaagttctgagtnaaatagatt

SEQ ID NO: 234 - DNA, 477 bp, Homo sapiens
  misc_feature 3, 463: n = A,T,C or G
ggnggttaaagtatttattgatgtgtttaaactgtgtacattctccacagatcatattaaggagtttgtaggtgaagtttaatctgtgcatagtgggtagagacatgaatagggtcaaaggggaggaaaaaggaaaaaaacaaaacaaaaacagtcacaggaaaataaaaatacaccacaggttaccagaaccttcagatttaaaataaaaagaaagaaaaagcagaagcagtgagcatcgacatcaactgtacaagcattacaaagactcctgtgacgaaaacacaattgttcaaagctttccacagtgtccacagactcagtttcagggacagcctggactactttcctttcacacaaacaaacctccccgtgttctctcctgggccagcggccgcctccttggtgtggtcttctctgagtgaatgtcacaaggccggtgacaggagggggtggaggtgangggacaaaagttga

SEQ ID NO: 235 - DNA, 457 bp, Homo sapiens
  misc_feature 366, 419, 445: n = A,T,C or G
ctactatgacaccttcaaaggagatgactacaatgaggagaatcctactgaacccggcagcgacggcaccatgtcagacaaggaaattactcatgatgtcaaagttcctccaactcctctgccaaccaatgatgttgatgtgtatttcgagacctctgcagatgataatgagcatgctcgcttccagaaggctaaggagcagctggagattcggcaccgcaaccgaatggacagggtaaagaaggaatgggaagaggcagagcttcaagctaagaacctccccaaagcagagaggcagactctgattcagcacttccaagccatggttaaagctttagagaaggaagcagcagtgagaagcatcanctggtggagacccacctggcccgagtggaagctatgctgaatgaccgccgtcntgatggctcttggagaactacctggntggcttgcggcg

SEQ ID NO: 236 - DNA, 224 bp, Homo sapiens
  misc_feature 169, 185, 196, 197, 208, 216: n = A,T,C or G
aaagaaaggggcttggggaacttaaaaattctcaaaaatgaggtcaatggcaaaccaagaatgctgatgcgaagagaccaagtactaaaagtgtgtgctaatcattggataacaactacaatgaacctgaagcccctctctggatcagatagagcatggatgtggttanccagtgatgtctctgntggtgatgccnnactagaggggngcgcgccnacccattc

SEQ ID NO: 237 - DNA, 455 bp, Homo sapiens
gctacttcaagctcatgtttgaccgctccgaggtctatggccccatgaagaactacctgaagaagcaggtcacacccctcttcattcacttcagaaataataccaacaactggagggagatcccagaaaacctgatggaccagtacagcgaggttaatgccatcagcaccgcctgctccaacggagttccagagtgtgaggagatggtctctggccttttcaagcagtggatggagaaccccaataataacccgatccaccccaacctgcggtccaccgtctactgcaacgctatcgcccagggcggggaggaggagtgggacttcgcctgggagcagttccgaaatgccacactggtcaatgaggctgacaagctccgggcagccctggcctgcagcaaagagttgtggatcctgaacaggtacctgagctacaccctgaacccggacttaatc

SEQ ID NO: 238 - DNA, 455 bp, Homo sapiens
gaacgtgatcgtttaacaagtaaagaagaggaacttaaggatatacagaatatgaatttcttattaaaagctgaagtgcagaaattacaggccctggcaaatgagcaggctgctgctgcacatgaattggagaagatgcaacaaagtgtttatgttaaagatgataaaataagattgctggaagagcaactacaacatgaaatttcaaacaaaatggaagaatttaagattctaaatgaccaaaacaaagcattaaaatcagaagttcagaagctacagactcttgtttctgaacagcctaataaggatgttgtggaacaaatggaaaaatgcattcaagaaaaagatgagaagttaaagactgtggaagaattacttgaaactggacttattcaggtggcaactaaagaagaggagctgaatgcaataagaacagaaaattcatctctgacaaa

SEQ ID NO: 239 - DNA, 724 bp, Homo sapiens
  misc_feature 227, 289, 361, 374, 385, 392, 409, 479, 491, 493, 553, 566,582, 584, 602, 634, 642, 651, 693, 700, 707, 720: n = A,T,C or G
gaataataagcatccttttatttgctgacgccattacaaaaaccgattacattagcaacaaaaaagtgttttcttgagttgaagtcagaggcagttacttcccaaaatgttaagtaaaacagtgtacaacatcagtattaaaatgttaaattttacattgtctttaccactttgatcttctgaacaattttattgagcaaaataagataaaagattacatgtttatnttcaggaatgtaaaggtctaattattcaaacagtttttattataaaactaaactctgaaggngtctacagagttggcttttttttttccttctttaaatcagtagtctaacaaggattagaaaagacaaaactntgttcagtgtttntgacaaagtanaaagggngaaaacataaataaggntttaatttggcaaaatataatacaatgccttttttatcctcaaatgaacagtttcccaattacttcactntaacacctggtngngctctttctcctttgtgagctgttggtttaccgcctgaagcaactgctgtaactgtgttncaggctgatttanacttacagacattggntncttctcagaagactccgnttctgggggaaacatcactattttcaataacnggaggtgnctcccagcnggcttttactattttttgacctggaataagctccagggaccntgttggngcccttntgcaaaatcaccnggtt

SEQ ID NO: 240 - DNA, 756 bp, Homo sapiens
gaacgtgatcgtttaacaagtaaagaagaggaacttaaggatatacagaatatgaatttcttattaaaagctgaagtgcagaaattacaggccctggcaaatgagcaggctgctgctgcacatgaattggagaagatgcaacaaagtgtttatgttaaagatgataaaataagattgctggaagagcaactacaacatgaaatttcaaacaaaatggaagaatttaagattctaaatgaccaaaacaaagcattaaaatcagaagttcagaagctacagactcttgtttctgaacagcctaataaggatgttgtggaacaaatggaaaaatgcattcaagaaaaagatgagaagttaaagactgtggaagaattacttgaaactggacttattcaggtggcaactaaagaagaggagctgaatgcaataagaacagaaaattcatctctgacaaaagaagttcaagacttaaaagctaagcaaaatgatcaggtttcttttgcctctctagttgaagaacttaagaaagtgatccatgagaaagatggaaagatcaagtctgtagaagagcttctggaggcagaacttctcaaagttgctaacaaggagaaaactgttcaggatttgaaacaggaaataaaggctctaaaagaagaaataggaaatgtccagcttgaaaaggctcaacagttatctatcacttccaaagttcaggagcttcagaactttttaaaaggaaagaggacccgatgaatt

SEQ ID NO: 241 - DNA, 712 bp, Homo sapiens
  misc_feature 130, 180, 233, 261, 312, 332, 347, 413, 480, 488, 499, 528,576, 586, 595, 666, 670, 683, 689: n = A,T,C or G
agtttttccaaagatttattgaagcagaaacaagttggttggatacttgctggaaaaaaaaaagcagttttaatggtattcaaaataccttttaaaaagtattctagcacaagatttttctgtaaactanattatgttgtaaacttttttctaaatcttgtaggagtgtcggttgttaanaactagagcttattcctattccaaatctatcttgcgctcctgaaaaactgcanaaaggcacttgaaagctgtttctttaanatatggatttcttttttattcttgctggtaatatattgctgcactgagtgngtgcaatttttattcaaggncatcgtgatgctganaagtttcgttgataacctgtccatctctagtttcaaccgtcttaatcagaagtgtcctttttgagngggtatcaaccagagggagtgaatccagattagtttccctcaggttcagggaggaaaagtttggaanaggcaganaaatcctgctntcctcgccttccagcagcttcctgtaggnggcaatctcaatgtcaagggccatcttaacattgagcaggtcttggtnttccgaaggngacgagccntttcctccttcatattctgaatctcatcctgcaggcggccaatagtgcttggtaggtagcgcttcaacggnaaanttcttttcctttncccatntggggttccagggcctcttggtt

SEQ ID NO: 242 - DNA, 751 bp, Homo sapiens
  misc_feature 734: n = A,T,C or G
gcctgcggagcagcgtgcccggggtgcggctcctgcaggactcggtggacttctcgctggccgacgccatcaacaccgagttcaagaacacccgcaccaacgagaaggtggagctgcaggagctgaatgaccgcttcgccaactacatcgacaaggtgcgcttcctggagcagcagaataagatcctgctggccgagctcgagcagctcaagggccaaggcaagtcgcgcctgggggacctctacgaggaggagatgcgggagctgcgccggcaggtggaccagctaaccaacgacaaagcccgcgtcgaggtggagcgcgacaacctggccgaggacatcatgcgcctccgggagaaattgcaggaggagatgcttcagagagaggaagccgaaaacaccctgcaatctttcagacaggatgttgacaatgcgtctctggcacgtcttgaccttgaacgcaaagtggaatctttgcaagaagagattgcctttttgaagaaactccacgaagaggaaatccaggagctgcaggctcagattcaggaacagcatgtccaaatcgatgtggatgtttccaagcctgacctcacggctgccctgcgtgacgtacgtcagcaatatgaaagtgtggctgccaagaacctgcaggaggcagaaagaatggtacaaatccaagtttgctgacctctctgaggttgccaaccggaacaatgacccctgcgcccagcaaancaggagtccctgagtcc

SEQ ID NO: 243 - DNA, 454 bp, Homo sapiens
  misc_feature 374, 413, 423, 429: n = A,T,C or G
gggaaggacgcgccacctacttcctgaatcccctgcaaaccccagaggagctcggcctgcgctgcgccacgatgtccggggagtcagccaggagcttggggaagggaagcgcgcccccggggccggtcccggagggctcgatccgcatctacagcatgaggttctgcccgtttgctgagaggacgcgtctagtcctgaaggccaagggaatcaggcatgaagtcatcaatatcaacctgaaaaataagcctgagtggttctttaagaaaaatccctttggtctggtgccagttctggaaaacagtcagggtcagctgatctacgagtctgccatcacctgtgagtacctggatgaagcatacccagggaagaanctgttgccggatgacccctatgagaaagcttgcccaaanatgatcttanagttgntttctaaggtgccatccttggtagg

SEQ ID NO: 244 - DNA, 518 bp, Homo sapiens
  misc_feature 117, 199, 342, 357, 361, 400, 434, 451, 471, 478, 498, 512,516: n = A,T,C or G
ccgggcaccaacgttggttttaatggcatcaacacccaggaggtcacacgtcagttctggttggcaacgtctaggggtgaggggctgtggcctccagtcggccccacagcctttganaactggctgcccggtcccacccgcttcccgccccgccccactgaaaaaacactaaacgattgcactgacagacagaccccanagcgcccggcctcccacacacccacggggctgtcaaagtcaaccagggctttggcgtcactcggcggtggcccggggctgcgcccaggatagtgtttatcaaatgtgacacaggttcatttacaaactggggctctggaaggnctacttctgtggctntaanagacttgtctctcatggcttctctcggagctaccggaanttggacctggataacgctgtgtaggttggttggnttatttgtaaggaatgngtaaggcattttggtaagtngaaccgntaacttctttttccaaaganggaaactcagacanaggngc

SEQ ID NO: 245 - DNA, 196 bp, Homo sapiens
  misc_feature 12, 140, 164, 170, 189: n = A,T,C or G
aaaaatatacanttttaatagaaatattaaaataatcattacacttcctctcattgcagaaaccatgaaagaatatgccttttgtaatcaaagtaattttttatcatgcaaaaaagtattttgttatgacattcgtaagnggagactgtatttcaaaacaagtntatacnggacttcaaaaggtctaangtcaaag

SEQ ID NO: 246 - DNA, 296 bp, Homo sapiens
  misc_feature 223, 266, 277, 285: n = A,T,C or G
gcgcagcggagtttggtggagctgcgggaaatgttgaagcgccaggagagacttttgcgcaacgaaaaattcatttgcaaattgcccgacaaaggtaaaaagatctttgactcttttgccaaactgaaagctgctattgcagaatgtgaagaagttagaagaaaaagtgaactgtttaaccctgttagtttagactgtaagctaaggcaaaaagcaattgcanaagttgatgtgggtacagataaggcccagaattctgacccganacttgatactncatcactnttcctggatgt

SEQ ID NO: 247 - DNA, 753 bp, Homo sapiens
  misc_feature 711: n = A,T,C or G
gttgtggagtgtggaggagaaagggtggaatcggtggtgatcaaaaaccttaagaagacacccaactttccaagttctgttctcttcatgaaagtgttcttgcccaaggaggaattgtacatgcccccactggtgatcaaggtcatcgaccacaggcagtttgggcggaagcctgtcgtcggccagtgcaccatcgagcgcctggaccgctttcgctgtgacccttatgcagggaaagaggacatcgtcccacagctcaaagcctcccttctgtctgccccaccatgccgggacatcgttatcgaaatggaagacaccaaaccattactggcttctaagctgacagaaaaggaggaagaaatcgtggactggtggagtaaattttatgcttcctcaggggaacatgaaaaatgcggacagtatattcagaaaggctattccaagctcaagatatataattgtgaactagaaaatgtagcagaatttgagggcctgacagacttctcagatacgttcaagttgtaccgaggcaagtcggatgaaaatgaagatccttctgtggttggagagtttaagggctcctttcggatctaccctctgccggatgaccccagcgtgccagcccctcccagacagtttcgggaattacctgacagcgtcccacaggaatgcacggttaggatttacattgttcgaggcttagagcttcancccccaggacaacaatgggcctgtgtgacccttacataaaaa

SEQ ID NO: 248 - DNA, 456 bp, Homo sapiens
ggacgcgctagtgttcttctgtgtggcagttcagaatgatggatcaagctagatcagcattctctaacttgtttggtggagaaccattgtcatatacccggttcagcctggctcggcaagtagatggcgataacagtcatgtggagatgaaacttgctgtagatgaagaagaaaatgctgacaataacacaaaggccaatgtcacaaaaccaaaaaggtgtagtggaagtatctgctatgggactattgctgtgatcgtctttttcttgattggatttatgattggctacttgggctattgtaaaggggtagaaccaaaaactgagtgtgagagactggcaggaaccgagtctccagtgagggaggagccaggagaggacttccctgcagcacgtcgcttatattgggatgacctgaagagaaagttgtcggagaaactggacagcacagacttca

SEQ ID NO: 249 - DNA, 454 bp, Homo sapiens
  misc_feature 412, 418, 440: n = A,T,C or G
gaaggctggcatcattcaggacacctggcacaaggccactcagaagggtgaccctgtggcgattctgaaacgccagctggaagagaaggaaaaactgctggccacagaacaggaagatgcggctgtcgccaagagcaaactgagggagctcaacaaggagatggcagcagaaaaggccaaagcagcagccggggaggccaaagtgaaaaagcagctggtggcccgggagcaggagatcacggctgtgcaggcacgcatgcaggccagctaccgggagcacgtgaaggaggtgcagcagctgcagggcaagatccggactcttcaggagcagctggagaatggccccaacacgcagctggcccgcctgcagcaggagaactccatcctgcgggatgccttgaaccaggccacnagccangtggagagcaagcagaacgcanagctggccaagctt

SEQ ID NO: 250 - DNA, 454 bp, Homo sapiens
cggcagacggcgaggacggacaggacccgcacagcaagcacctgtacacggccgacatgttcacgcacgggatccagagcgccgcgcacttcgtcatgttcttcgcgccctggtgtggacactgccagcggctgcagccgacttggaatgacctgggagacaaatacaacagcatggaagatgccaaagtctatgtggctaaagtggactgcacggcccactccgacgtgtgctccgcccagggggtgcgaggataccccaccttaaagcttttcaagccaggccaagaagctgtgaagtaccagggtcctcgggacttccagacactggaaaactggatgctgcagacactgaacgaggagccagtgacaccagagccggaagtggaaccgcccagtgcccccgagctcaagcaagggctgtatgagctctcagcaagcaactttgagctgca

SEQ ID NO: 251 - DNA, 455 bp, Homo sapiens
ctccgcttcagttctagcagaagaattacataaagtgattgcagaaaaggataagcagataaaacagactgaagattctttagcaagtgaacgtgatcgtttaacaagtaaagaagaggaacttaaggatatacagaatatgaatttcttattaaaagctgaagtgcagaaattacaggccctggcaaatgagcaggctgctgctgcacatgaattggagaagatgcaacaaagtgtttatgttaaagatgataaaataagattgctggaagagcaactacaacatgaaatttcaaacaaaatggaagaatttaagattctaaatgaccaaaacaaagcattaaaatcagaagttcagaagctacagactcttgtttctgaacagcctaataaggatgttgtggaacaaatggaaaaatgcattcaagaaaaagatgagaagttaaagactgtgg

SEQ ID NO: 252 - DNA, 749 bp, Homo sapiens
  misc_feature 734, 749: n = A,T,C or G
cagctatgagcgtgtggatggttctgtgagaggagaagagagacacttggccattaagaactttggacagcagcccattttcgtttttctcctgagtactagggcaggtggagttggcatgaacttaacagcagcagatactgtgatttttgttgacagtgactttaatcctcagaatgacttgcaagcagctgccagggctcatcgcattggccaaaacaagtctgttaaagttattcggctgattggtcgagacactgtggaagaaatagtctataggaaagcagcctccaaactgcagctcaccaacatgatcatagaaggaggccattttactctgggagcccagaaacccgctgccgatgctgacctccagttgagtgagatactcaaatttggtttggataaactgctggcctctgaggggagcaccatggatgaaatagacctggagtccatcctgggagaaacaaaagatggccagtgggtctctgatgccttgcctgcagcagaaggagggagcagagatcaagaggaaggaaaaaatcatatgtacttatttgaaggtaaagattattctaaagagcccagtaaggaagacagaaaatcatttgaacaactggtaaaccttcagaaaacccttttggagaaagctagtcaagagggccgatcactccgaaataaaggcagtgttctcatcccaggccttgtggagggatctacccaaaaggaancggggtctgagtccn

SEQ ID NO: 253 - DNA, 714 bp, Homo sapiens
  misc_feature 8, 68, 79, 114, 132, 139, 160, 185, 199, 226, 286, 316, 349,428, 468, 482, 485, 498, 625, 642, 682, 684, 688: n = A,T,C or G
aggaacanaaaatttattattatgcaactagcaagctggggtcaaagggctttcccaaaaaaagttgngtttccctatnttacaggtaccaaaacagagcaaaacatccagganaaccaaactgaaactcanaaaaganacaatttctgaggcccaccanatcctgattccattttgaaatactntattgcagtacctntgggtaaatattagctggttgctaaanacaggatctgaggctgggccaattcttaaggcaccagctgtcttgaggaggaagatgaanactgtgaatgaaggacagcagacttgcttntaggaaaataatatatgtaagttgggatgcctnttgcagccagatgtttccgaataagtcgctcagtaccataccagttaaaacctttcgtggcatgtccaatacgtggaanatgaacacttgctttcttcttttttgctgctaaaaatatnttcttcaggccctnttntagggctgccatnttaatgccagacaggacattggaacgatcacgatgctgagccacaatcaaggccaacaaatcttgccctttgtttcttgattctttatcatcaacaggaaataaaaggacacctcccaaactcaggnctttcattttcccaccngctcatatatttttcttggctcaccggatcgcttttccananctgnaataaaccccccttttgccccatggc

SEQ ID NO: 254 - DNA, 456 bp, Homo sapiens
gaacagcggaacatgaggcagcacagcaagatttacagagtaaatttgtggccaaagaaaatgaagtacagagtctgcatagtaagcttacagataccttggtatcaaaacaacagttggagcaaagactaatgcagttaatggaatcagagcagaaaagggtgaacaaagaagagtctctacaaatgcaggttcaggatattttggagcagaatgaggctttgaaagctcaaattcagcagttccattcccagatagcagcccagacctccgcttcagttctagcagaagaattacataaagtgattgcagaaaaggataagcagataaaacagactgaagattctttagcaagtgaacgtgatcgtttaacaagtaaagaagaggaacttaaggatatacagaatatgaatttcttattaaaagctgaagtgcagaaattacaggccctggcaa

SEQ ID NO: 255 - DNA, 751 bp, Homo sapiens
  misc_feature 750: n = A,T,C or G
cgtctacgcagtctctcacagcagaaacaaaggacatagctttggaacctaaggaacaaaaacatgaagacaggcagagcaatacaccttctcctcctgttagtaccttttcatcaggtacttctaccaccagtgatattgaagttttagatcatgaaagtgtaataagtgagagctcagcgagctcgagacaagagactacagattcaaaatcaagtcttcacttgatgcagacatcttttcagcttctctctgcatctgcttgtcctgaatataatcgtttagatgatttccaaaaactcactgagagttgctgttcatctgatgcttttgaaagaatagactcatttagtgtacagtcattagatagccggagtgtaagtgaaatcaattcagatgatgaattgtcaggcaagggatatgctttagtgcctattatagttaattcttcaactccaaagtctaaaacagttgaatctgctgaaggaaaatctgaagaagtaaatgaaacattagttatacccactgaggaagcagaaatggaagaaagtggacgaagtgcaactcctgttaactgtgaacagcctgatatcttggtttcttctacaccaataaatgaaggacagactgtgttagacaaggtggctgagcagtgtgaacctgctgaaagtcagcccagaagcactttctgagaaggaagatgtttgcaagacagttgaatttctgaatgaaaagctggaaaaaagggang

SEQ ID NO: 256 - DNA, 714 bp, Homo sapiens
  misc_feature 291, 496, 654, 699, 707: n = A,T,C or G
aaagagtaaattatgttaagaactttattattttcgattcattttatagggtagtaaaataatacttcttcaaaatcatttaaatgttattgatgccattgcaaaatcattataaataaattttctccattatccaatcacatctagataacattgaatatgtacaggtttctctggataggtaccaaaaggtaccacattttatacagacttaattgtgaaagctgggtgaaataaattttcagatcaaaattttttttaagtttaaatcattcactctttaaatttcanacagtgtcagtgtgactcttacttttaaaggaaaaaaattagtttaaaatttaatagccacagatttaataattttttactttaacacttaatgtacattttcatgagcagtaattaagatatgttgaaattttaaatgtgaaagatttcaaagtttcagtatgttaacattactcttcaaatgttcttaatatatatataaacncttacaaattatagatacaactagttgtatatctacaatacatatatgaacaccattcttcttctctagccatatttatatgagggataaagtaataaatctctgtgctattcaaggaaaaaaaatgaatgctttaaaaaataaatctttaaagaatngtttcaaaaataaagttcaaatattgccaaaaataatttaactgnaaatattnctacata

SEQ ID NO: 257 - DNA, 439 bp, Homo sapiens
  misc_feature 333, 335, 337, 339, 342, 354, 356, 357, 361, 362, 363, 366,369, 375, 388, 390, 391, 393: n = A,T,C or G
ccggagtagccctcggtgaagccccagaccacagctatgagtcccttcgtgtgacgtctgcgcagaaacatgttctgcatgtccagctcaaccggcccaacaagaggaatgccatgaacaaggtcttctggagagagatggtagagtgcttcaacaagatttcgagagacgctgactgtcgggcggtggtgatctctggtgcaggaaaaatgttcactgcaggtattgacctgatggacatggcttcagacatcctgcagcccaaaggagatgatgtggcccggatcagctggtacctccgtgacatcatcactcgataccaggagacctttnancntnttnaaaaggggcccnanncccnnnatngtngccgcnttgggggttgttngnngnaggggggggaccttgtcaccgcctgtgacatccggtactgtgccca

SEQ ID NO: 258 - DNA, 700 bp, Homo sapiens
  misc_feature 33, 557, 568, 592, 633, 645, 646, 651, 667: n = A,T,C or G
ttgaaggacaatgccactgaggaggagatcctngtttacttggagaagacctgtgactggcttccgaaaccgaacatgtctgcttcatgcaaggagatagtggactcctacctccctgtcatcctggacatcattaaaggagaaatgagccgtcctggggaggtgtgctctgctctcaacctctgcgagtctctccagaagcacctagcagagctgaatcaccagaagcagctggagtccaataagatcccagagctggacatgactgaggtggtggcccccttcatggccaacatccctctcctcctctaccctcaggacggcccccgcagcaagccccagccaaaggataatggggacgtttgccaggactgcattcagatggtgactgacatccagactgctgtacggaccaactccacctttgtccaggccttggtggaacatgtcaaggaggagtgtgaccgcctgggccctggcatggccgacatatgcaagaactatatcagccagtattctgaaattgctatccagatgatgatgcacatgcaacccanggagatcttgngcgctggttgggttctgagatgangtgaaaagagatgcccatgcagactctgggccccgccaaantggcctccaaanntgtcntccctgccttggactngtggaagcccattaagaaagcacgagggccccc

SEQ ID NO: 259 - DNA, 682 bp, Homo sapiens
  misc_feature 23, 42, 55, 119, 354, 444, 489, 522, 524, 528, 533, 599,607, 620, 633, 646, 666: n = A,T,C or G
catccatatttatttgaaaaggncaaaaggagcatctatganacaagggaggggngcaggctgaagcagcgcctcaacagccagggacatgtaggcaacacgagcaggcacagggcggncaccactgtccacacgctcacacaagccaggcccgcagggccttcggagagctagcaggttacattcaggcagatggccctcttcccacccaaacccacagaaccccaaacaaggcatcaccaggaaagacacgggaaagccaaatcacagttgaaccagggacagagaacccttggccccactgatgtcccaagccaccagcagctgcttccaaaatccctatgctattacagngggaattacatcatttaaaaagcctgattattccaggcttctaatctttcatataaaactgcctttgttttgctgctttgttcaactganaggcccaggaaagcggggagggtccctgatcagggcaggaggccncctcagaagcccaggcccaccagtgcccaagcncntgtnagggntcagaacaaggcctcaaccaaaaagggttgatggcctccagtaaagaaactgtgggctcatgccancagagctntctcctcctccancagggccgccatngcaaggggcaggnctaaaaagacctccccggtngcatcaaccttcccat

SEQ ID NO: 260 - DNA, 455 bp, Homo sapiens
gggcagcgcgctgcgccccagcaccagccgcagcctctacgcctcgtccccgggcggcgtgtatgccacgcgctcctctgccgtgcgcctgcggagcagcgtgcccggggtgcggctcctgcaggactcggtggacttctcgctggccgacgccatcaacaccgagttcaagaacacccgcaccaacgagaaggtggagctgcaggagctgaatgaccgcttcgccaactacatcgacaaggtgcgcttcctggagcagcagaataagatcctgctggccgagctcgagcagctcaagggccaaggcaagtcgcgcctgggggacctctacgaggaggagatgcgggagctgcgccggcaggtggaccagctaaccaacgacaaagcccgcgtcgaggtggagcgcgacaacctggccgaggacatcatgcgcctccgggagaaattgcaggagg

SEQ ID NO: 261 - DNA, 423 bp, Homo sapiens
  misc_feature 5, 56, 377: n = A,T,C or G
ttcanatggtgactgacatccagactgctgtacggaccaactccacctttgtccangccttggtggaacatgtcaaggaggagtgtgaccgcctgggccctggcatggccgacatatgcaagaactatatcagccagtattctgaaattgctatccagatgatgatgcacatgcaacccaaggagatctgtgcgctggttgggttctgtgatgaggtgaaagagatgcccatgcagactctggtccccgccaaagtggcctccaagaatgtcatccctgccctggaactggtggagcccattaagaagcacgaggtcccagcaaagtctgatgtttactgtgaggtgtgtgaattcctggtgaaggaggtgaccaanctgattgacaacaacaagactgagaaagaaatactcgacgcttttg

SEQ ID NO: 262 - DNA, 278 bp, Homo sapiens
  misc_feature 218, 221, 223, 242, 252, 253, 256, 257, 263, 268, 270: n = A,T,C or G
ccggacttgcccacagcctcaaggaggagacggcgaggcccggcccccgctgtccctggtgtaaagaagtcgccgtagccgtcgcggccgggactccccgggctctcgcccttcaggtttcgttgacactcaggaccgtacgtacgctgcgccatgttcaagaaactgaagcaaaagatcagcgaggagcagcagcagttccagcaggggctggttcntgntnaggggtcctccaatttttnacccccaccnnaanngaggancgggncntttttttt

SEQ ID NO: 263 - DNA, 423 bp, Homo sapiens
  misc_feature 2: n = A,T,C or G
gntacaaaggatcggtgtaagcagttaacccaggaaatgatgacagagaaagaaagaagcaatgtggttataacaaggatgaaagatcgaattggaacattagaaaaggaacataatgtatttcaaaacaaaatacatgtcagttatcaagagactcaacagatgcagatgaagtttcagcaagttcgtgagcagatggaggcagagatagctcacttgaagcaggaaaatggtatactgagagatgcagtcagcaacactacaaatcaactggaaagcaagcagtctgcagaactaaataaactacgccaggattatgctaggttggtgaatgagctgactgagaaaacaggaaagctacagcaagaggaagtccaaaagaagaatgctgagcaagcagctactcagttgaaggttcaacta

SEQ ID NO: 264 - DNA, 394 bp, Homo sapiens
  misc_feature 392: n = A,T,C or G
gaataataagcatccttttatttgctgacgccattacaaaaaccgattacattagcaacaaaaaagtgttttcttgagttgaagtcagaggcagttacttcccaaaatgttaagtaaaacagtgtacaacatcagtattaaaatgttaaattttacattgtctttaccactttgatcttctgaacaattttattgagcaaaataagataaaagattacatgtttatcttcaggaatgtaaaggtctaattattcaaacagtttttattataaaactaaactctgaaggtgtctacagagttggcttttttttttccttctttaaatcagtagtctaacaaggattagaaaagacaaaactctgttcagtgtttctgacaaagtagaaagggnga

SEQ ID NO: 265 - DNA, 414 bp, Homo sapiens
ccgttacaagatgaggtctgtgtatgctcacttccccatcaacgttgttatccaggagaatgggtctcttgttgaaatccgaaatttcttgggtgaaaaatacatccgcagggttcggatgagaccaggtgttgcttgttcagtatctcaagcccagaaagatgaattaatccttgaaggaaatgacattgagcttgtttcaaattcagcggctttgattcagcaagccacaacagttaaaaacaaggatatcaggaaatttttggatggtatctatgtctctgaaaaaggaactgttcagcaggctgatgaataagatctaagagttacctggctacagaaagaagatgccagatgacacttaagacctacttgtgatatttaaatgatgcaataaaagacctattgatttgg

SEQ ID NO: 266 - DNA, 380 bp, Homo sapiens
  misc_feature 183, 197, 320, 345, 363: n = A,T,C or G
tgctcctctgcccccccggcaagacctcaacgcccctgacctctatatccccacgatggccttcattacttacgtgctcctggctgggatggcactgggcattcagaaaaggttctccccggaggtgctgggcctgtgtgcaagcacagcgctggtgtgggtggtgatggaggtgctggccgngctcctggggctcnacctggccaccgtgcgcagtgacctgagcacctttcacctgctggcctacagtggctacaaatacgtgggaatgatcctcagtgtgctcacggggctgctgttcggcagcgatggctactacntggcgctggcctggacctcatcggngctcatgtacttcattgngcgctctttgcggacag

SEQ ID NO: 267 - DNA, 411 bp, Homo sapiens
ctccgcttcagttctagcagaagaattacataaagtgattgcagaaaaggataagcagataaaacagactgaagattctttagcaagtgaacgtgatcgtttaacaagtaaagaagaggaacttaaggatatacagaatatgaatttcttattaaaagctgaagtgcagaaattacaggccctggcaaatgagcaggctgctgctgcacatgaattggagaagatgcaacaaagtgtttatgttaaagatgataaaataagattgctggaagagcaactacaacatgaaatttcaaacaaaatggaagaatttaagattctaaatgaccaaaacaaagcattaaaatcagaagttcagaagctacagactcttgtttctgaacagcctaataaggatgttgtggaacaaat

SEQ ID NO: 268 - DNA, 412 bp, Homo sapiens
ccgacatatgcaagaactatatcagccagtattctgaaattgctatccagatgatgatgcacatgcaacccaaggagatctgtgcgctggttgggttctgtgatgaggtgaaagagatgcccatgcagactctggtccccgccaaagtggcctccaagaatgtcatccctgccctggaactggtggagcccattaagaagcacgaggtcccagcaaagtctgatgtttactgtgaggtgtgtgaattcctggtgaaggaggtgaccaagctgattgacaacaacaagactgagaaagaaatactcgacgcttttgacaaaatgtgctcgaagctgccgaagtccctgtcggaagagtgccaggaggtggtggacacgtacggcagctccatcctgtccatcctgctggagga

SEQ ID NO: 269 - DNA, 413 bp, Homo sapiens
cagggaaccagggcatcgaggctgcgatggactggctgatggagcacgaagacgaccccgatgtggacgagcctttagagactccccttggacatatcctgggacgggagcccacttcctcagagcaaggcggccttgaaggatctggttctgctgccggagaaggcaaacccgctttgagtgaagaggaaagacaggaacaaactaagaggatgttggagctggtggcccagaagcagcgggagcgtgaagaaagagaggaacgggaggcattggaacgggaacggcagcgcaggagacaagggcaagagttgtcagcagcacgacagcggctacaggaagatgagatgcgccgggctgctgaggagaggcggagggaaaaggccgaggagttagcagccagacaaagagtt

SEQ ID NO: 270 - DNA, 412 bp, Homo sapiens
gtgggccagaagatgtgcttcagcctgtgcagagagcagaggcagaaagaccagaagagcaggctgaagcgtcgggtctgaagaaagagacggatgtagtgttgaaagtagatgctcaggaggcaaaaactgagccttttacacaagggaaggtggtggggcagaccaccccagaaagctttgaaaaagctcctcaagtcacagagagcatagagtccagtgagcttgtaaccacttgtcaagccgaaaccttagctggggtaaaatcacaggagatggtgatggaacaggctatcccccctgactcggtggaaacccctacagacagtgagactgatggaagcacccccgtagccgactttgacgcaccaggcacaacccagaaagacgagattgtggaaatccatgagga

SEQ ID NO: 271 - DNA, 423 bp, Homo sapiens
gtagcccgggccgggggcatcgagaccatcgccaatgagttcagcgaccggtgcaccccgtcagtcatatcatttggatcaaaaaatagaacaatcggagttgcagccaaaaatcagcaaatcactcatgcaaacaatacggtgtctaacttcaaaagatttcatggccgagcattcaatgaccccttcattcaaaaggagaaggaaaacttgagttacgatttggttccattgaaaaatggtggagttggaataaaggtaatgtacatgggtgaagaacatctatttagtgtggagcagataacagccatgttgttgactaagctgaaggaaactgctgaaaacagcctcaagaaaccagtaacagattgtgttatttcagtcccctccttctttacagatgctgagaggcgatctgtgtta

SEQ ID NO: 272 - DNA, 385 bp, Homo sapiens
  misc_feature 17, 24, 41, 56, 76, 83, 99, 113, 122, 157, 178, 182, 193,211, 227, 233, 236, 259, 299, 307, 317, 343, 344, 347, 353,364, 372, 380, 382, 383: n = A,T,C or G
ggctctaaagggggtanagggggngctatagggtaaatacnggccctatttcaaanatttttaggggaattaattntaggacnatgggcatgaaactgnggtttgctccacanatttcaaancattgaccgtagtatacccccggtcgtgtagcggngaaagtggtttggtttaaacntccnggaattgcatntgtttttaagcctaatgnggggacagctcatgantgcaanacntcttgtgatgtaattattatacnaatgggggcttcaatcgggagtactactcgattgtcaacntcaaggantcccaggtcncctggttctaggaataatgggggaannatntagganttgaaaattantccgccgntagtcggngnnct

SEQ ID NO: 273 - DNA, 412 bp, Homo sapiens
gtgcttttaacaagggaaaattgaaggtactgggaacagcttttgatcctttcttaggaggaaaaaacttcgatgaaaagttagtggaacatttttgtgcagaatttaaaactaagtacaagttggatgcaaaatccaaaatacgagcactcctacgtctgtatcaggaatgtgaaaaactgaaaaagctaatgagctctaacagcacagaccttccactgaatatcgaatgctttatgaatgataaagatgtttccggaaagatgaacaggtcacaatttgaagaactctgtgctgaacttctgcaaaagatagaagtacccctttattcactgttggaacaaactcatctcaaagtagaagatgtgagtgcagttgagattgttggaggcgctacacgaattccagctgt

SEQ ID NO: 274 - DNA, 411 bp, Homo sapiens
gccatgacgaccgcgtcacctcgcaggtgcgccagaactaccaccaggactcagaggccgccatcaaccgccagatcaacctggagctctacgcctcctacgtttacctgtccatgtcttactactttgaccgcgatgatgtggctttgaagaactttgccaaatactttcttcaccaatctcatgaggagagggaacatgctgagaaactgatgaagctgcagaaccaacgaggtggccgaatcttccttcaggatatcaagaaaccagactgtgatgactgggagagcgggctgaatgcaatggagtgtgcattacatttggaaaaaaatgtgaatcagtcactactggaactgcacaaactggccactgacaaaaatgacccccatttgtgtgacttcattgagacac

SEQ ID NO: 275 - DNA, 412 bp, Homo sapiens
aaaagaagcactataaaccaagttcacacaagctgaaggtcatttccaaatccatgggaaccagcacaggagctacagcaaatcatggcacttctgcagtagcaattactagccatgattacctaggacaagaaactttgacagaaatccaaacctcaccagaaacatcaatgagagaggtgaaagcggacggagctagcacccccaggttaagagaacaggactgtggtgaacctgcctcgccagcagcatccatctccagactctctggggaacaggtcgacgggaagggccaggcaggcagtgtatctgaaagtgcgcggagtgaaggaaggattagtccaaagagtgatattactgacactggcctggcacagagcaacaatttgcaggtccccagttcttcagaacc

SEQ ID NO: 276 - DNA, 412 bp, Homo sapiens
acgccatcaacaccgagttcaagaacacccgcaccaacgagaaggtggagctgcaggagctgaatgaccgcttcgccaactacatcgacaaggtgcgcttcctggagcagcagaataagatcctgctggccgagctcgagcagctcaagggccaaggcaagtcgcgcctgggggacctctacgaggaggagatgcgggagctgcgccggcaggtggaccagctaaccaacgacaaagcccgcgtcgaggtggagcgcgacaacctggccgaggacatcatgcgcctccgggagaaattgcaggaggagatgcttcagagagaggaagccgaaaacaccctgcaatctttcagacaggatgttgacaatgcgtctctggcacgtcttgaccttgaacgcaaagtggaatcttt

SEQ ID NO: 277 - DNA, 412 bp, Homo sapiens
aaagaaaggggcttggggaacttaaaaattctcaaaaatgaggtcaatggcaaaccaagaatgctgatgcgaagagaccaagtactaaaagtgtgtgctaatcattggataacaactacaatgaacctgaagcccctctctggatcagatagagcatggatgtggttagccagtgatttctctgatggtgatgccaaactagagcggttggcagcacaatttaaaacaccagagctggctgaagaattcaagcagaaatttgaggaatgccagcggcttctgttagacataccacttcaaactccccataaacttgtagatactggcagagctgccaagctaatacagagagctgaagaaatgaagagtggactgaaagatttcaaaacgtttttgacaaatgatcaaacaa

SEQ ID NO: 278 - DNA, 412 bp, Homo sapiens
agcagcccagacctccgcttcagttctagcagaagaattacataaagtgattgcagaaaaggataagcagataaaacagactgaagattctttagcaagtgaacgtgatcgtttaacaagtaaagaagaggaacttaaggatatacagaatatgaatttcttattaaaagctgaagtgcagaaattacaggccctggcaaatgagcaggctgctgctgcacatgaattggagaagatgcaacaaagtgtttatgttaaagatgataaaataagattgctggaagagcaactacaacatgaaatttcaaacaaaatggaagaatttaagattctaaatgaccaaaacaaagcattaaaatcagaagttcagaagctacagactcttgtttctgaacagcctaataaggatgtt

SEQ ID NO: 279 - DNA, 413 bp, Homo sapiens
ggaactttataaggtacatttgaagaatacagaaatagaaaataccaagcttatgtcagaggtccagactttaaaaaatttagatgggaacaaagaaagcgtgattactcatttcaaagaagagattggcaggctgcagttatgtttggctgaaaaggaaaatctgcaaagaactttcctgcttacaacctcaagtaaagaagatacttgttttttaaaggagcaacttcgtaaagcagaggaacaggttcaggcaactcggcaagaagttgtctttctggctaaagaactcagtgatgctgtcaacgtacgagacagaacgatggcagacctgcatactgcacgcttggaaaacgagaaagtgaaaaagcagttagctgatgcagtggcagaacttaaactaaatgctatga

SEQ ID NO: 280 - DNA, 411 bp, Homo sapiens
agtagaagggatccagaaatctgggactaaaaaactgaagaccgaaactgacaaagaaaatgctgaagtgaagtttaaagattttcttctgtccttgaagactatgatgttttctgaagatgaggctctttgtgttgtagacttgctaaaggagaagtctggtgtaatacaagatgctttaaagaagtcaagtaagggagaattgactacgcttatacatcagcttcaagaaaaggacaagttactcgctgctgtgaaggaagatgctgctgctacaaaggatcggtgtaagcagttaacccaggaaatgatgacagagaaagaaagaagcaatgtggttataacaaggatgaaagatcgaattggaacattagaaaaggaacataatgtatttcaaaacaaaatacatgt

SEQ ID NO: 281 - DNA, 411 bp, Homo sapiens
caaaggataatggggacgtttgccaggactgcattcagatggtgactgacatccagactgctgtacggaccaactccacctttgtccaggccttggtggaacatgtcaaggaggagtgtgaccgcctgggccctggcatggccgacatatgcaagaactatatcagccagtattctgaaattgctatccagatgatgatgcacatgcaacccaaggagatctgtgcgctggttgggttctgtgatgaggtgaaagagatgcccatgcagactctggtccccgccaaagtggcctccaagaatgtcatccctgccctggaactggtggagcccattaagaagcacgaggtcccagcaaagtctgatgtttactgtgaggtgtgtgaattcctggtgaaggaggtgaccaagc

SEQ ID NO: 282 - DNA, 412 bp, Homo sapiens
gttcagcgccggcgccggtgtgcgagccgcggcagagtgaggcaggcaacccgaggtgcggagcgacctgcggaggctgagccccgctttctcccagggtttcttatcagccagccgccgctgtccccgggggagtaggaggctcctgacaggccgcggctgtctgtgtgtccttctgagtgtcagaggaacggccagaccccgcgggccggagcagaacgcggccagggcagaaagcggcggcaggagaagcaggcagggggccggaggacgcagaccgagacccgaggcggaggcggaccgcgagccggccatgtcggtggtggggttggacgtgggctcgcagagctgctacatcgcggtagcccgggccgggggcatcgagaccatcgccaatgagttcagcgaccgg

SEQ ID NO: 283 - DNA, 412 bp, Homo sapiens
gctggttcccgggccacatggccaaggggctgaagaagatgcagagcagcctgaagctggtggactgtatcatcgaggtccacgatgcccggatcccactttcaggccgcaaccctctgtttcaggaaacccttgggcttaagcctcacttgctggtcctcaacaagatggacttggcggatcttacagagcagcagaaaattatgcaacacttagaaggagaaggcctaaaaaatgtcatttttaccaactgtgtaaaggatgaaaatgtcaagcagatcatcccgatggtcactgaactgattgggagaagccaccgctaccaccgaaaagagaacctggagtactgtatcatggtcattggggtccccaacgtgggcaagtcctccctcatcaactccctccggaggca

SEQ ID NO: 284 - DNA, 413 bp, Homo sapiens
aaagagcaatcaaggcgatgacaccagaacaagaagagacagcgtccctcctctccagcgttacccagggcatggagagtgcctatgtgtcccctagtggttatcgtttagttagtgaaacagaatggaatctcttgcagaaagaggtacataatgctggaaataaacttggtagacgttgtgatatgtgttccaattacgaaaaacagttacaaggaattcagattcaggaggctgaaacgagagaccaggtgaaaaaactacagctgatgctaaggcaagctaatgaccagttagagaagacaatgaaagataagcaggagctggaagacttcataaagcaaagcagcgaagattcgagtcaccagatctctgcactcgtcctaagagcccaggccttccgagatcttact

SEQ ID NO: 285 - DNA, 412 bp, Homo sapiens
  misc_feature 412: n = A,T,C or G
tgggaacccaggccccgccgaggcggccaggaggtgagatggcagctgggcaaaatgggcacgaagagtgggtgggcagcgcatacctgtttgtggagtcctcgctggacaaggtggtcctgtcggatgcctacgcgcacccccagcagaaggtggcagtgtacagggctctgcaggctgccttggcagagagcggcgggagcccggacgtgctgcagatgctgaagatccaccgcagcgacccgcagctgatcgtgcagctgcgattctgcgggcggcagccctgtggccgcttcctccgcgcctaccgcgaagggggcgctgcgcgccgcgctgcagaggagcctggcggccgcgctcgcccagcactcggtgccgctgcaactggagctgcgcgccggcgccgagcggn

SEQ ID NO: 286 - DNA, 412 bp, Homo sapiens
gctatccgagcaggatgcggttcgtggttgccttggtcctcctgaacgtcgcagcggcgggagccgtgccgctcttggccaccgaaagcgtcaagcaagaagaagctggagtacggccttctgcaggaaacgtctccacccaccccagcttgagccaacggcctggaggctctaccaagtcgcatccggagccgcagactccaaaagacagccctagcaagtcgagtgcggaggcgcagaccccagaagacacccccaacaagtcgggtgcggaggcaaagacccaaaaagacagctccaacaagtcgggtgcggaggcaaagacccaaaaaggcagcactagcaagtcgggttcggaggcgcagaccacaaaagacagcactagtaagtcgcatccggagctgcagactcc

SEQ ID NO: 287 - DNA, 413 bp, Homo sapiens
aagacctgaaacaggagtcacgttttcatgtgctactgactacctatgagatttgcttgaaagatgcatcatttctaaaatcattcccttggagtgttcttgttgtggatgaagctcacaggttgaaaaaccaaagctccctgctgcataagaccttgtcagagttctcagtagtcttcagtctcctgttgaccggaactcccatccagaacagcctccaagagctctactccctcctcagttttgtggagcctgatctcttttccaaggaagaggtgggagattttattcaacgctaccaggatattgagaaagaatctgagtcagcaagtgaactgcacaaactcttgcagccatttctgctgaggcgagtgaaagctgaggtagctacagagcttcccaagaagacagaa

SEQ ID NO: 288 - DNA, 413 bp, Homo sapiens
  misc_feature 350, 395, 404: n = A,T,C or G
gcaaatgcgaggagctgagtggcctccacgggcagctccaggaggccagggcggagaactcccagctcacagagagaatccgttccattgaggccctgctggaggcgggccaggcgcgggatgcccaggacgtccaggccagccaggcggaggctgaccagcagcagactcgcctcaaggagctggagtcccaggtgtcgggtctggagaaggaggccatcgagctcagggaggccgtcgagcagcagaaagtgaagaacaatgacctccgggagaagaactggaaggccatggaggcactggccacggccgagcaggcctgcaaggagaagctgcactccctgacccangccaaggaggaatcggagaagcagctctgtctgattgaggcgcanaccatggangccctgctg

SEQ ID NO: 289 - DNA, 412 bp, Homo sapiens
cttctttggaaaactattctcctgtatcaagaattggtttgttcattaaagcaggcagtagatatgaggacttcagcaatttaggaaccacccatttgctgcgtcttacatccagtctgacgacaaaaggagcttcatctttcaagataacccgtggaattgaagcagttggtggcaaattaagtgtgaccgcaacaagggaaaacatggcttatactgtggaatgcctgcggggtgatgttgatattctaatggagttcctgctcaatgtcaccacagcaccagaatttcgtcgttgggaagtagctgaccttcagcctcagctaaagattgacaaagctgtggcctttcagaatccgcagactcatgtcattgaaaatttgcatgcagcagcttaccggaatgccttggc

SEQ ID NO: 290 - DNA, 413 bp, Homo sapiens
cctacaagacgctggtctccacggttgggagcatggtgttcaacgagggcgaggcccagcggctcatcgagatcctgtctgagaaggctggcatcattcaggacacctggcacaaggccactcagaagggtgaccctgtggcgattctgaaacgccagctggaagagaaggaaaaactgctggccacagaacaggaagatgcggctgtcgccaagagcaaactgagggagctcaacaaggagatggcagcagaaaaggccaaagcagcagccggggaggccaaagtgaaaaagcagctggtggcccgggagcaggagatcacggctgtgcaggcacgcatgcaggccagctaccgggagcacgtgaaggaggtgcagcagctgcagggcaagatccggactcttcaggagcag

SEQ ID NO: 291 - DNA, 412 bp, Homo sapiens
agattttcaagtcccggctggtggagttgttagtgtcctatggcaacaccttctttgtggttctcattgtcatccttgtgctgttggtcatcgatgccgtgcgcgaaattcggaagtatgatgatgtgacggaaaaggtgaacctccagaacaatcccggggccatggagcacttccacatgaagcttttccgtgcccagaggaatctctacattgctggcttttccttgctgctgtccttcctgcttagacgcctggtgactctcatttcgcagcaggccacgctgctggcctccaatgaagcctttaaaaagcaggcggagagtgctagtgaggcggccaagaagtacatggaggagaatgaccagctcaagaagggagctgctgttgacggaggcaagttggatgtcgg

SEQ ID NO: 292 - DNA, 411 bp, Homo sapiens
  misc_feature 347: n = A,T,C or G
caaagatctaaatgttaaagagaaaataattgaagacatgcgaatgacactagaagaacaggaacaaactcaggtagaacaggatcaagtgcttgaggctaaattagaggaagttgaaaggctggccacagaattggaaaaatggaaggaaaaatgcaatgatttggaaaccaaaaacaatcaaaggtcaaataaagaacatgagaacaacacagatgtgcttggaaagctcactaatcttcaagatgagttacaggagtctgaacagaaatataatgctgatagaaagaaatggttagaagaaaaaatgatgcttatcactcaagcgaaagaagcagagaatattncgaaataaagagatgaaaaaatatgctgaggacagggagcgttttttaagccacagatgaatgg

SEQ ID NO: 293 - DNA, 412 bp, Homo sapiens
ctaactatggcgaccgccacggagcagtgggttctggtggagatggtacaggcgctttacgaggctcctgcttaccatcttattttggaagggattctgatcctctggataatcagacttcttttctctaagacttacaaattacaagaacgatctgatcttacagtcaaggaaaaagaagaactgattgaagagtggcaaccagaacctctttgttcctcctgtcccaaaagaccatcctgctctcaactacaacatcgtttcaggccctccaagccacaaaactgtggtgaatggaaaagaatgtataaacttcgcctcatttaattttcttggattgttggataaccctagggttaaggcagcagctttagcatctctaaagaagtatggcgtggggacttgtggaccc

SEQ ID NO: 294 - DNA, 411 bp, Homo sapiens
agattctttagcaagtgaacgtgatcgtttaacaagtaaagaagaggaacttaaggatatacagaatatgaatttcttattaaaagctgaagtgcagaaattacaggccctggcaaatgagcaggctgctgctgcacatgaattggagaagatgcaacaaagtgtttatgttaaagatgataaaataagattgctggaagagcaactacaacatgaaatttcaaacaaaatggaagaatttaagattctaaatgaccaaaacaaagcattaaaatcagaagttcagaagctacagactcttgtttctgaacagcctaataaggatgttgtggaacaaatggaaaaatgcattcaagaaaaagatgagaagttaaagactgtggaagaattacttgaaactggacttattca

SEQ ID NO: 295 - DNA, 412 bp, Homo sapiens
  misc_feature 28: n = A,T,C or G
ggtctttgggggtaggcggtagtggcgnaagaggttcggcggctgatggcggatcaggatcggaagcctgcgtaactttctcccttgatccgggagtctttccactggattcacaatgacatcctttcaagaagtcccattgcagacttccaactttgcccatgtcatctttcaaaatgtggccaagagttaccttcctaatgcacacctggaatgtcattacaccttaactccatatattcatccacatccaaaagattgggttggtatattcaaggttggatggagtactgctcgtgattattacacgtttttatggtcccctatgcctgaacattatgtggaaggatcaacagtcaattgtgtactagcattccaaggatattaccttccaaatgatgatggagaattt

SEQ ID NO: 296 - DNA, 412 bp, Homo sapiens
gcccaggggaccccgggccacggagagcgggaagaggatggattgcccggccctcccccccggatggaagaaggaggaagtgatccgaaaatctgggctaagtgctggcaagagcgatgtctactacttcagtccaagtggtaagaagttcagaagcaagcctcagttggcaaggtacctgggaaatactgttgatctcagcagttttgacttcagaactggaaagatgatgcctagtaaattacagaagaacaaacagagactgcgaaacgatcctctcaatcaaaataagggtaaaccagacttgaatacaacattgccaattagacaaacagcatcaattttcaaacaaccggtaaccaaagtcacaaatcatcctagtaataaagtgaaatcagacccacaacgaatg

SEQ ID NO: 297 - DNA, 413 bp, Homo sapiens
tgtgtcaccaaaggaaatcttgaacctgaccagtgagctgctgcagaaatgcagcagtccggcgcctggcccaggaaaagagtgggaagagtatgtgcagatccggactctggttgagaaaatacggaaaaagcaaaaaggtctgtccgttacttttgatggaaaaagagaagattactttcctgatctaatgaaatgggcctctgaaaatggggcttctgtcgagggttttgaaatggttaacttcaaagaagagggctttggtttgagagcaacaagagatatcaaggcagaagaattgtttttatgggttccacgaaaattgctaatgactgttgaatctgctaaaaattcagtgttggggcccttatattctcaagaccgaatccttcaagccatgggaaacatcgcac

SEQ ID NO: 298 - DNA, 412 bp, Homo sapiens
tgaataagggcccagcttccagcaatagagacagggtaccaccttcatctgaagctagtgagcatcacccgcggcatcgtgtttcaagtcaagcggaagatacttccagcagctttgacaacctgtttattgacaggttacagaggatcaccattgcggaccaaggtgaacaacagtcagaagaaaacgcaagtactaagaacttgacaggcctttccagtgggactgagaagaaacctcattacatggaagtgctagaaatgcgagccaaaaacccagtgccccagctgcgtaaatttaaaaccaatgtgttaccttttcgacaaaatgattcatctagtcattgccagaagagtgggtctcctatttcctcagaagagcggcggcgcagggataagcagcatcttgatga

SEQ ID NO: 299 - DNA, 423 bp, Homo sapiens
cggcccgcaaggatttgaaaccgtttggcaggggcggcggtggcggcggcgttggcggcagcggccgagcggaaagcttgcgtgtggtggtgccagattggattatggaagtgggaagtgaagaagaaaaatgggagaagctggatgcagaatttgatcactttgtggttgatatgaagccctttgttctaaaattacctcataggacagaacggcagaggtgtgctctttggattagaaagctgtgcgaaccttcaggaacaggtgcaggaataatggggaggaagaatcggaacctgtatgcaaaattgttattgcatatgcttaaacgaggtgcgcttgaaggcccttttacacaccgacctgaacccgggacactaaaaattctaccttcatacatgtccatctattttgatgaaccaa

SEQ ID NO: 300 - DNA, 395 bp, Homo sapiens
  misc_feature 6, 7, 210: n = A,T,C or G
gaatgnngcatgtttttatgatcttaattacatttaaggatttaaaaaatgccactgatctcacagtttacaatatccaaatcttcaaacctgctggaagaagtccacagcacagcctggaaattgcatccgttgcattctctcgtgcagttaccttctgccttgatatgtagtcagttcttcctgaaggatggaagctctcttttgcanaaaattaacctgtgattttagggaggaaatggtgtcttcaagttcttgtcttagggatgctggcatcaatcctttcaattttgtttcatattcttgtccgtatgtaagttatctgttcctgtgactccaattctttgtgttgtaattttttctctgcacatcgcacctgattagaacggttttct

SEQ ID NO: 301 - DNA, 455 bp, Homo sapiens
gtagcccgggccgggggcatcgagaccatcgccaatgagttcagcgaccggtgcaccccgtcagtcatatcatttggatcaaaaaatagaacaatcggagttgcagccaaaaatcagcaaatcactcatgcaaacaatacggtgtctaacttcaaaagatttcatggccgagcattcaatgaccccttcattcaaaaggagaaggaaaacttgagttacgatttggttccattgaaaaatggtggagttggaataaaggtaatgtacatgggtgaagaacatctatttagtgtggagcagataacagccatgttgttgactaagctgaaggaaactgctgaaaacagcctcaagaaaccagtaacagattgtgttatttcagtcccctccttctttacagatgctgagaggcgatctgtgttagatgctgcacagattgttggcctaaactgttt

SEQ ID NO: 302 - DNA, 455 bp, Homo sapiens
  misc_feature 411, 417, 431, 436, 438, 439, 446, 449: n = A,T,C or G
aagacctgaaacaggagtcacgttttcatgtgctactgactacctatgagatttgcttgaaagatgcatcatttctaaaatcattcccttggagtgttcttgttgtggatgaagctcacaggttgaaaaaccaaagctccctgctgcataagaccttgtcagagttctcagtagtcttcagtctcctgttgaccggaactcccatccagaacagcctccaagagctctactccctcctcagttttgtggagcctgatctcttttccaaggaagaggtgggagattttattcaacgctaccaggatattgagaaagaatctgagtcagcaagtgaactgcacaaactcttgcagccatttctgctgaggcgagtgaaagctgaggtagctacagagcttcccaagaagacanaagtantgatataccatggnatgtnannattgcanaanaaatac

SEQ ID NO: 303 - DNA, 367 bp, Homo sapiens
  misc_feature 257, 264, 274, 291, 293, 298, 299, 318, 340, 347, 348, 353,361, 365: n = A,T,C or G
ggttcgagtaatgctgactcaagtcctgtggtagataagagagaggttattgatttgcttaaacctgaccaagtagaagggatccagaaatctgggactaaaaaactgaagaccgaaactgacaaagaaaatgctgaagtgaagtttaaagattttcttctgtccttgaagactatgatgttttctgaagatgaggctctttgtgttgtagacttgctaaaggagaagtctggtgtaatacaagatgctttaaaganccaagtnagggagaatngactacgcttatacatnancttcnngaaaaggacaagttactcnctgctgtgaacgaagatgctgntgctacnnacgancggcgttnggangc

SEQ ID NO: 304 - DNA, 421 bp, Homo sapiens
actcggtggacttctcgctggccgacgccatcaacaccgagttcaagaacacccgcaccaacgagaaggtggagctgcaggagctgaatgaccgcttcgccaactacatcgacaaggtgcgcttcctggagcagcagaataagatcctgctggccgagctcgagcagctcaagggccaaggcaagtcgcgcctgggggacctctacgaggaggagatgcgggagctgcgccggcaggtggaccagctaaccaacgacaaagcccgcgtcgaggtggagcgcgacaacctggccgaggacatcatgcgcctccgggagaaattgcaggaggagatgcttcagagagaggaagccgaaaacaccctgcaatctttcagacaggatgttgacaatgcgtctctggcacgtcttgaccttgaacg

SEQ ID NO: 305 - DNA, 393 bp, Homo sapiens
  misc_feature 180, 347: n = A,T,C or G
agtttttccaaagatttattgaagcagaaacaagttggttggatacttgctggaaaaaaaaaagcagttttaatggtattcaaaataccttttaaaaagtattctagcacaagatttttctgtaaactagattatgttgtaaacttttttctaaatcttgtaggagtgtcggttgttaanaactagagcttattcctattccaaatctatcttgcgctcctgaaaaactgcagaaaggcacttgaaagctgtttctttaagatatggatttcttttttattcttgctggtaatatattgctgcactgagtgtgtgcaatttttattcaaggtcatcgtgatgctganaagtttcgttgataacctgtccatctctagtttcaaccgtcttaat

SEQ ID NO: 306 - DNA, 391 bp, Homo sapiens
  misc_feature 2, 4, 38, 112, 121, 122, 144, 150, 170, 180, 181, 183, 185,188, 194, 200, 206, 207, 231, 234, 236, 237, 240, 254, 255,257, 261, 268, 274, 285, 286, 290, 295, 296, 302, 308, 310,317, 319, 321, 332, 338, 341, 350, 353, 355, 357, 358: n = A,T,C or G
  misc_feature 362, 364, 365, 371, 373, 375, 389: n = A,T,C or G
antntatcagccagtattctgaaattgctatccagatnatgatgcacatgcaacccaaggagatctgtgcgctggttgggttctgtgatgaggtgaaagagatgcccatgcngactctggnnccccgccaaagcggcctccacnaatgtnatccctgccctggaactggnggagcccatnnanangcncgaggncccagncgaagnntcatgaggacgggtgaggcgggcnaancnnctncacgcaccgagtcnnancgancgccgcngaggcngtgcggcacgnncgcnccccnncccccnccgacncncccggancncnacccgacccgngcaccncanaggccggcnatntngnncccncnnccaccngntnggccatccgacctncc

SEQ ID NO: 307 - DNA, 423 bp, Homo sapiens
aaaaaatatggagacattccagagtatgtcctggcctatattgactatctttctcacctcaatgaggacaataatacccgagttttgtttgaacgagttttaacatctggaagccttcctcctgagaagtctggagaaatctgggcccgatttctagcatttgaaagtaatattggtgatctagctagtatactcaaagtggagaaaagacggtttacagcattcaaagaagagtatgaagggaaagaaacggctttactagtagacagatacaagttcatggatttatatccttgctctgcaagtgaattaaaagcacttggttataaggatgtctcccgtgctaagctagcagctataattccggacccagttgtagctccttctatagtgcctgttctgaaagatgaagtggatagaaaa

SEQ ID NO: 308 - DNA, 387 bp, Homo sapiens
  misc_feature 93, 100, 117, 132, 139, 206, 225, 237, 251, 342, 361, 379: n = A,T,C or G
ctgaatccttttattttttaaaggacttttaaaatttgaaactacaaaacggatttcatacattctgccataaataaaaacaaacaataaggnaggactntacataagcaaaccaanaacaattgttttcanaaaatgngataaaatgctttacaatcataagccatccagtttttaaaataaaactgttgaaaaactcacaaatnttcaagcggcacatacaanacacccttgaanagggaacaaaatgnggttctgccactttgtactgttctcacatttttgaaaacctaattttgcttaaagcataggtctgttccgtattctaaaattcacacaggntggtttgttttttctcaanaaccatgtgatagaggcnccaatgac

SEQ ID NO: 309 - DNA, 422 bp, Homo sapiens
cctggtcctcgcctcctccgctgtctccctggagttcttgcaagtcggccaggatgtctcaggctgagtttgagaaagctgcagaggaggttaggcaccttaagaccaagccatcggatgaggagatgctgttcatctatggccactacaaacaagcaactgtgggcgacataaatacagaacggcccgggatgttggacttcacgggcaaggccaagtgggatgcctggaatgagctgaaagggacttccaaggaagatgccatgaaagcttacatcaacaaagtagaagagctaaagaaaaaatacgggatatgagagactggatttggttactgtgccatgtgtttatcctaaactgagacaatgccttgtttttttctaataccgtggatggtgggaattcgggaaaataaccagtta

SEQ ID NO: 310 - DNA, 393 bp, Homo sapiens
  misc_feature 5, 85, 96: n = A,T,C or G
aaagnggacaaatacacttttaattgatttcagataaaaactactcaaggaaagtcagtaatcgttttagcccctaatctgttanagccgtatggngagcagccttgagtagctggtttaactggttattttcccgaattcccaccatccacggtattagaaaaaaacaaggcattgtctcagtttaggataaacacatggcacagtaaccaaatccagtctctcatatcccgtattttttctttagctcttctactttgttgatgtaagctttcatggcatcttccttggaagtccctttcagctcattccaggcatcccacttggccttgcccgtgaagtccaacatcccgggccgttctgtatttatgtcgcccacagttgcttgtttgt

SEQ ID NO: 311 - DNA, 421 bp, Homo sapiens
acggcccccgcagcaagccccagccaaaggataatggggacgtttgccaggactgcattcagatggtgactgacatccagactgctgtacggaccaactccacctttgtccaggccttggtggaacatgtcaaggaggagtgtgaccgcctgggccctggcatggccgacatatgcaagaactatatcagccagtattctgaaattgctatccagatgatgatgcacatgcaacccaaggagatctgtgcgctggttgggttctgtgatgaggtgaaagagatgcccatgcagactctggtccccgccaaagtggcctccaagaatgtcatccctgccctggaactggtggagcccattaagaagcacgaggtcccagcaaagtctgatgtttactgtgaggtgtgtgaattcctggtgaa

SEQ ID NO: 312 - DNA, 421 bp, Homo sapiens
actggatgctgcagacactgaacgaggagccagtgacaccagagccggaagtggaaccgcccagtgcccccgagctcaagcaagggctgtatgagctctcagcaagcaactttgagctgcacgttgcacaaggcgaccactttatcaagttcttcgctccgtggtgtggtcactgcaaagccctggctccaacctgggagcagctggctctgggccttgaacattccgaaactgtcaagattggcaaggttgattgtacacagcactatgaactctgctccggaaaccaggttcgtggctatcccactcttctctggttccgagatgggaaaaaggtggatcagtacaagggaaagcgggatttggagtcactgagggagtacgtggagtcgcagctgcagcgcacagagactggagcgac

SEQ ID NO: 313 - DNA, 370 bp, Homo sapiens
  misc_feature 15, 16, 93, 166, 249, 287, 294, 297, 304, 345, 352, 366: n = A,T,C or G
ggttttaataataannatccttttatttgctgacgccattacaaaaaccgattacattagcaacaaaaaagtgttttcttgagttgaagtcanaggcagttacttcccaaaatgttaagtaaaacagtgtacaacatcagtattaaaatgttaaattttacattgnctttaccactttgatcttctgaacaattttattgagcaaaataagataaaagattacatgtttatcttcaggaatgtaaaggnctaattattcaaacagtttttattataaaactaaactntgaaggngtntacaganttggcttttttttttccttctttaaatcaggagtctaacanggattanaaaagacaaaactntgtt

SEQ ID NO: 314 - DNA, 403 bp, Homo sapiens
  misc_feature 39: n = A,T,C or G
aagaggaagtccaaaagaagaatgctgagcaagcagctnctcagttgaaggttcaactacaagaagctgagagaaggtgggaagaagttcagagctacatcaggaagagaacagcggaacatgaggcagcacagcaagatttacagagtaaatttgtggccaaagaaaatgaagtacagagtctgcatagtaagcttacagataccttggtatcaaaacaacagttggagcaaagactaatgcagttaatggaatcagagcagaaaagggtgaacaaagaagagtctctacaaatgcaggttcaggatattttggagcagaatgaggctttgaaagctcaaattcagcagttccattcccagatagcagcccagacctccgcttcagttctagcagaagaatt

SEQ ID NO: 315 - DNA, 407 bp, Homo sapiens
tgcagactctggtccccgccaaagtggcctccaagaatgtcatccctgccctggaactggtggagcccattaagaagcacgaggtcccagcaaagtctgatgtttactgtgaggtgtgtgaattcctggtgaaggaggtgaccaagctgattgacaacaacaagactgagaaagaaatactcgacgcttttgacaaaatgtgctcgaagctgccgaagtccctgtcggaagagtgccaggaggtggtggacacgtacggcagctccatcctgtccatcctgctggaggaggtcagccctgagctggtgtgcagcatgctgcacctctgctctggcacgcggctgcctgcactgaccgttcacgtgactcagccaaaggacggtggcttctgcgaagtgtgcaagaag

SEQ ID NO: 316 - DNA, 421 bp, Homo sapiens
  misc_feature 4, 37: n = A,T,C or G
cggnggcggcggcggcggcggacgggccccccgcggnagacggcgaggacggacaggacccgcacagcaagcacctgtacacggccgacatgttcacgcacgggatccagagcgccgcgcacttcgtcatgttcttcgcgccctggtgtggacactgccagcggctgcagccgacttggaatgacctgggagacaaatacaacagcatggaagatgccaaagtctatgtggctaaagtggactgcacggcccactccgacgtgtgctccgcccagggggtgcgaggataccccaccttaaagcttttcaagccaggccaagaagctgtgaagtaccagggtcctcgggacttccagacactggaaaactggatgctgcagacactgaacgaggagccagtgacaccagagccggaagtgga

SEQ ID NO: 317 - DNA, 375 bp, Homo sapiens
  misc_feature 7, 141, 274, 303, 308, 310: n = A,T,C or G
ctggggnccaaatttctttatttgaaggaatggtacaaatcaaagaacttaagtggatgttttggtacaacttatagaaaaggtaaaggaaaccccaacatgcatgcactgccttggtgaccagggaagtcaccccacggntatggggaaattagcccgaggcttagctttcattatcactgtctcccagggtgtgcttgtcaaagagatattccgccaagccaaattcgggcgctcccatcttgcgcaagttggtcacgtggtcacccaattntttgatggctttcacctgctcattcaggnaatgngnctcaatgaagtcacacaaatgggggtcatttttgtcagtggccagtttgtgcagttccagtagat

SEQ ID NO: 318 - DNA, 403 bp, Homo sapiens
gccatgacgaccgcgtcacctcgcaggtgcgccagaactaccaccaggactcagaggccgccatcaaccgccagatcaacctggagctctacgcctcctacgtttacctgtccatgtcttactactttgaccgcgatgatgtggctttgaagaactttgccaaatactttcttcaccaatctcatgaggagagggaacatgctgagaaactgatgaagctgcagaaccaacgaggtggccgaatcttccttcaggatatcaagaaaccagactgtgatgactgggagagcgggctgaatgcaatggagtgtgcattacatttggaaaaaaatgtgaatcagtcactactggaactgcacaaactggccactgacaaaaatgacccccatttgtgtgacttcat

SEQ ID NO: 319 - DNA, 376 bp, Homo sapiens
  misc_feature 33: n = A,T,C or G
acacaccatgacaacttttattgccctcaaganaaactccagtccacctgctccacccaccctcctgcgggaccaaagaaaacacccagagggcaaaacaaaaaggggctcaaaccaacaggaagtcagccccaccgcaagccggactacaactaactcgtgctctccacgctcaggcgtggaagccaaggctgtgccaggcctggccaggccaagcaggatgacagcaaacgcattctgaacgtgtagcaatcaggtcccctgtaatgtgcttggagagtgtggacaagggccgagatgacgagctatgagctgtggaagggaatgggggaagcagaagggcacaaacagaagtactggagggagaggccgggct

SEQ ID NO: 320 - DNA, 403 bp, Homo sapiens
ggaaactcggaaacaagctcacatcttcctgtgggaaaccttctagcaacaggatgagtctgcagtggactgcagttgccaccttcctctatgcggaggtctttgttgtgttgcttctctgcattcccttcatttctcctaaaagatggcagaagattttcaagtcccggctggtggagttgttagtgtcctatggcaacaccttctttgtggttctcattgtcatccttgtgctgttggtcatcgatgccgtgcgcgaaattcggaagtatgatgatgtgacggaaaaggtgaacctccagaacaatcccggggccatggagcacttccacatgaagcttttccgtgcccagaggaatctctacattgctggcttttccttgctgctgtccttcctgcttag

SEQ ID NO: 321 - DNA, 394 bp, Homo sapiens
  misc_feature 29, 34, 40, 42, 44, 46, 51, 58, 63, 68, 70, 72, 78, 80, 89,93, 96, 99, 103, 108, 110, 139, 141, 157, 169, 174, 177,186, 200, 203, 205, 272, 279, 374: n = A,T,C or G
aaatataatatatatttataattcccggnccttnaaaacnantntnggagntaaaaanccaanttttnantntttagnanaaaggccantttnaanctntccngtgananggaattaggaaactggcattaaaaccccncncagttacttgacaatnacctttaaaacnttaanttntttcggacncccaggaatcaggntanancatccctcgggctctgtggagtggctggcaccacctgcggctgctggggaaggcggctggcggggancggcccnttcctccctcgcaggccttgctcctgcctgcccacctggcacagcggggaccggccactcgcccttgctcccatgggctccacccgcctggcttnccgcctgcagctgactagaa

SEQ ID NO: 322 - DNA, 427 bp, Homo sapiens
  misc_feature 75, 77: n = A,T,C or G
gggcaccgaagggcgccgcggaaggacgggaaccggaagtgctcgcttgcagtttcccggagccggagcgcagcncntgcggccgcccgtgccccgccgtcctccttcccgcggccgtgagggagaccgcggctcggccgtagcggagctgcgaagttacagaatgtctgaaggggacagtgtgggagaatccgtccatgggaaaccttcggtggtgtacagatttttcacaagacttggacagatttatcagtcctggctagacaagtccacaccctacacggctgtgcgatgggtcgtgacactgggcctgagctttgtctacatgattcgagtttacctgctgcagggttggtacattgtgacctatgccttggggatctaccatctaaatcttttcatagcttttctttctcccaaagtggat

SEQ ID NO: 323 - DNA, 412 bp, Homo sapiens
  misc_feature 49, 50, 61, 62, 67, 69, 73, 75, 81, 83, 86, 93, 95, 97, 99,104, 106, 110, 120, 121, 122, 127, 130, 131, 137, 139, 142,143, 146, 148, 150, 153, 159, 169, 170, 173, 188, 191, 195,202, 221, 231, 243, 247, 265, 272, 273, 284, 311, 327: n = A,T,C or G
  misc_feature 331, 332, 334, 338, 352, 361, 371, 374, 389, 396, 397, 399: n = A,T,C or G
gcttgccatccatatttatttgaaaaggtcaaaaggaccttttttaaannaagggaggggnncaggntnaacnancccctnancanccagggncntntnggcancncaancaggcccagnnnggccnccnntgtccncnccnnacncnanccnagcccncaggggcttnnganaacttacagggtacnttnaagncgatggncctttttcccccaaacccncaaaaccccnaacaaggggatntccnggaaaaacacccggaaanccaaatnncagttgaaccncgggcaaaaaacccttggcccccctgnttgtccccaaccaccnacanntncttncaaaatccctatgntattacagngggaaatacntcntttaaaaagcctgantattccnngnttttaatttttca

SEQ ID NO: 324 - DNA, 724 bp, Homo sapiens
  misc_feature 3, 604, 663, 678: n = A,T,C or G
ccnacatatgcaagaactatatcagccagtattctgaaattgctatccagatgatgatgcaccatgcaacccaaggagatctgtgcgctggttgggttctgtgatgaggtgaaagagatgcccatgcagactctggtccccgccaaagtggcctccaagaatgtcatccctgccctggaactggtggagcccattaagaagcacgaggtcccagcaaagtctgatgtttactgtgaggtgtgtgaattcctggtgaaggaggtgaccaagctgattgacaacaacaagactgagaaagaaatactcggcgcttttgacaaaatgtgctcgaagctgccgaagtccctgtcggaagagtgccaggaggtggtggacacgtacggcagctccatcctgtccatcctgctggaggaggtcagccctgagctggtgtgcagcatgctgcacctctgctctggcacgcggctgcctgcactgaccgttcacgtgactcagccaaaggacggtggcttctgcgaagtgtgcaagaagctggtgggttatttggatcgcaacctggagaaaaacagctccaagcaggagatcctggctgctcttgagaaangctgcagcttctgccagacccttaccagaagcagtgtgatcagtttgtggcagagtacnagcccgtgctgatcnagatccttggtggaggggatgggatccttccttcgtgggctttgaa

SEQ ID NO: 325 - DNA, 392 bp, Homo sapiens
  misc_feature 12, 50, 91, 100, 127, 167, 218, 222, 238, 336, 339, 343,354, 366, 384, 386, 392: n = A,T,C or G
actggtaaactntattaactcataataaaaagtaactagtcaaaatttanaacattctgatcaaaatgggtctgcacatgcctttcaaacncctgctggncatagtcaggagggaactgctcgctgnacatcgggcacaccttccagtgactttcaacatgttcttnaaatttgctctgatcatagttaggaggaaacattaactcacagaggggacncttnttgtgaacatcaaagntggaatcaaagcaaaagcctgtcccatgccccctaaatgttgacttggaggatcaggagcactaggcacatttctcatcttctttgctatccctccanagncctnctaaagccatncagggcccaacntaaaagtttttgcacccnanggcctn

SEQ ID NO: 326 - DNA, 421 bp, Homo sapiens
  misc_feature 203, 205, 219, 231, 267, 283, 289, 294, 304, 307, 311, 312,320, 329, 343, 346, 361, 363, 367, 368, 378, 380, 381, 382,393, 395, 398, 402, 410, 413, 417: n = A,T,C or G
gggaggtgtagccggtctttgggggtaggcggtagtggcggaagaggttcggcggctgatggcggatcaggatcggaagcctgcgtaactttctcccttgatccgggagtctttccactggattcacaatgacatcctttcaagaagtcccattgcatacttccaactttgcccatgacatctttcaaaatgtcggccaagantnaccttcctaatgcncacctggaatgncattacaccttaactccatatattcatccacatccnaaagattgggttggtntattcnacgtnggatcgattnctnctcnntgattatnacccctctntatggtcccctatnccntcaccattatttcgnantgannatacctccancnnngctcctctaancnccncctntcgcatcnttncaancctt

SEQ ID NO: 327 - DNA, 387 bp, Homo sapiens
  misc_feature 4, 60, 82, 106, 140, 166, 329, 362: n = A,T,C or G
aagngaagcaaatattttatttaaatcagtcgtcaaatcacaacttatccaaatgaatgngttgcaacattgttcttaaaanaatggcacaaatatggcacaaacncaatccagtatctatcaaaataccatttgtaaanaacctgacttatttcatgccatgtgngaatgcagtccagcatataagagtagaatcaaaaacttacaacaattcttttcttcataacatataaaacatattcactactttgcctcaggattaagcacacttatcggtccaaacaaccataacaagtaggaaaaaggatgtaaagttaatttgctaccanaatataacttctttctaacctccactgggttanaaagaaaaatttcccaatgacaata

SEQ ID NO: 328 - DNA, 422 bp, Homo sapiens
gtgggccagaagatgtgcttcagcctgtgcagagagcagaggcagaaagaccagaagagcaggctgaagcgtcgggtctgaagaaagagacggatgtagtgttgaaagtagatgctcaggaggcaaaaactgagccttttacacaagggaaggtggtggggcagaccaccccagaaagctttgaaaaagctcctcaagtcacagagagcatagagtccagtgagcttgtaaccacttgtcaagccgaaaccttagctggggtaaaatcacaggagatggtgatggaacaggctatcccccctgactcggtggaaacccctacagacagtgagactgatggaagcacccccgtagccgactttgacgcaccaggcacaacccagaaagacgagattgtggaaatccatgaggagaatgaggtc

SEQ ID NO: 329 - DNA, 283 bp, Homo sapiens
  misc_feature 239, 240, 253: n = A,T,C or G
tgcagactctggtccccgccaaagtggcctccaagaatgtcatccctgccctggaactggtggagcccattaagaagcacgaggtcccagcaaagtctgatgtttactgtgaggtgtgtgaattcctggtgaaggaggtgaccaagctgattgacaacaacaagactgagaaagaaatactcgacgcttttgacaaaatgtgctcgaagctgccgaagtccctgtcggaagagtgccanngaggtggtggacncggtacggcagctccatcctgcccatcctg

SEQ ID NO: 330 - DNA, 394 bp, Homo sapiens
  misc_feature 360: n = A,T,C or G
gcttgccatccatatttatttgaaaaggtcaaaaggagcatctatgagacaagggaggggtgcaggctgaagcagcgcctcaacagccagggacatgtaggcaacacgagcaggcacagcgcggccaccactgtccacacgctcacacaagccaggcccgcagggccttcggagagctagcaggttacattcaggcagatggccctcttcccacccaaacccacagaaccccaaacaaggcatcaccaggaaagacacgggaaagccaaatcacagttgaaccagggacagagaacccttggccccactgatgtcccaagccaccagcagctgcttccaaaatccctatgctattacagngggaattacatcatttaaaaagcctgattattcc

SEQ ID NO: 331 - DNA, 421 bp, Homo sapiens
  misc_feature 271, 274: n = A,T,C or G
tgaaggacaatgccactgaggaggagatccttgtttacttggagaagacctgtgactggcttccgaaaccgaacatgtctgcttcatgcaaggagatagtggactcctacctccctgtcatcctggacatcattaaaggagaaatgagccgtcctggggaggtgtgctctgctctcaacctctgcgagtctctccagaagcacctagcagagctgaatcaccagaagcagctggagtccaataagatcccagagctggacatgactgaggnggnggcccccttcatggccaacatccctctcctcctctaccctcaggacggcccccgcagcaagccccagccaaaggataatggggacgtttgccaggactgcattcagatggtgactgacatccagactgctgtacggaccaactccac

SEQ ID NO: 332 - DNA, 183 bp, Homo sapiens
  misc_feature 6, 7, 9, 10, 52, 126, 128, 143, 144, 173: n = A,T,C or G
aaaaannannagtttatttagaaagtatcatagtgtaaacaaacaaattgtnccactttgattttcttggaatacaagactcgtgatgcaaagctgaagttgtgtgtacaagactcttgacagttngngcttctctaggaggnngggtttttttaaaaaaagaattatcctgngaaccatccg

SEQ ID NO: 333 - DNA, 421 bp, Homo sapiens
tggaagatgccaaagtctatgtggctaaagtggactgcacggcccactccgacgtgtgctccgcccagggggtgcgaggataccccaccttaaagcttttcaagccaggccaagaagctgtgaagtaccagggtcctcgggacttccagacactggaaaactggatgctgcagacactgaacgaggagccagtgacaccagagccggaagtggaaccgcccagtgcccccgagctcaagcaagggctgtatgagctctcagcaagcaactttgagctgcacgttgcacaaggcgaccactttatcaagttcttcgctccgtggtgtggtcactgcaaagccctggctccaacctgggagcagctggctctgggccttgaacattccgaaactgtcaagattggcaaggttgattgtacaca

SEQ ID NO: 334 - DNA, 393 bp, Homo sapiens
  misc_feature 34, 251: n = A,T,C or G
gaaattgcacttttattttaaaacagtgaagtgnggctattacatatttcacttttacaatcaatacatgttaggatcttacaagtattaaattgatgattttattatatataaatacacaaatggtccaaaacaatatctaaaatgttgcaatatttataaaatccataaaaatatttaattttcagtatgaaaatggcatactaatttgagtttgaggtaaatgaagagacagatttaggccatctaanaaggaagataaaggagaatgtcatatctatattttgggaaaagtcaaagaatgctaaagagcttgacctgttactgcattaatgacttcagacattatgcagatacatatactatatagtaataaataatacacaatgtaga

SEQ ID NO: 335 - DNA, 423 bp, Homo sapiens
ctaaagttgatgcagcactcttggtcagtctctgctctgacactggatcctgctaagcttctggaagaatttccacgttggctggaaaaactctctgctcgtcatcaaggcagcatcatcatcgttattgattctatagatcaagttcagcaagttgaaaaacacatgaaatggctgatagatccactgccagtgaatgtaagagtaattgtttctgtgaatgtagaaacatgccctccagcatggaggttgtggcctacacttcatcttgatcccttaagtccaaaagatgcaaaatctattataattgcagaatgccactctgtagacattaaattgagtaaagagcaggagaagaagctagaacgacactgtcgttctgctacaacctgcaatgccctttatgtcacccttttcggcaaa

SEQ ID NO: 336 - DNA, 351 bp, Homo sapiens
  misc_feature 7, 12, 19, 29, 41, 52, 55, 61, 77, 90, 94, 100, 120, 132,143, 146, 159, 162, 167, 172, 174, 198, 200, 209, 215, 231,242, 244, 246, 250, 274, 275, 302, 313, 317, 336, 342, 349,351: n = A,T,C or G
gaaaagnatgantcctttntttttgaccncaacttactgancaatgccgtanctntggaanaaaaacatttgttgcnctttttttggganccangccctntaggagggattggggatggnaaaacctcaggntttgcccaaanccnccccttggggggnggnggggntttantnaattggcattccggggcttaaggncncttttgggnaaaggnttggcaaggatggagngtccaaacctntnancctntaaaaactttactttttaaaaacnnccacccaaatggggggggcgtggggancaagggggggnaaanggactggggggtttggccntggccncctacanan

SEQ ID NO: 337 - DNA, 454 bp, Homo sapiens
acatgactgaggtggtggcccccttcatggccaacatccctctcctcctctaccctcaggacggcccccgcagcaagccccagccaaaggataatggggacgtttgccaggactgcattcagatggtgactgacatccagactgctgtacggaccaactccacctttgtccaggccttggtggaacatgtcaaggaggagtgtgaccgcctgggccctggcatggccgacatatgcaagaactatatcagccagtattctgaaattgctatccagatgatgatgcacatgcaacccaaggagatctgtgcgctggttgggttctgtgatgaggtgaaagagatgcccatgcagactctggtccccgccaaagtggcctccaagaatgtcatccctgccctggaactggtggagcccattaagaagcacgaggtcccagcaaagtctgatgttta

SEQ ID NO: 338 - DNA, 268 bp, Homo sapiens
  misc_feature 165, 208, 220, 225, 246, 266: n = A,T,C or G
agaacatctatttagtgtggagcagataacagccatgttgttgactaagctgaaggaaactgctgaaaacagcctcaagaaaccagtaacagattgtgttatttcagtcccctccttctttacagatgctgagaggcgatctgtgttagatgctgcacagattgntggcctaaactgtttaagacttatgaatgacatgacagctgtngctttgaatcancggantttataagcaggatctcccanccctggatgataaacgtcgnat

SEQ ID NO: 339 - DNA, 260 bp, Homo sapiens
  misc_feature 189, 211, 222, 229, 245, 254: n = A,T,C or G
ggcaacccgaggtgcggagcgacctgcggaggctgagccccgctttctcccagggtttcttatcagccagccgccgctgtccccgggggagtaggaggctcctgacaggccgcggctgtctgtgtgtccttctgagtgtcagaggaacggccagaccccgcgggccggagcacaacgcggtcatggcanaaagcggcggcaggagaagcangcagggggccngaggacncagaccgagaccccangcggatgcnggaccg

SEQ ID NO: 340 - DNA, 393 bp, Homo sapiens
aagggaagcaaatattttatttaaatcagtcgtcaaatcacaacttatccaaatgaatgtgttgcaacattgttcttaaaagaatggcacaaatatggcacaaacacaatccagtatctatcaaaataccatttgtaaagaacctgacttatttcatgccatgtgtgaatgcagtccagcatataagagtagaatcaaaaacttacaacaattcttttcttcataacatataaaacatattcactactttgcctcaggattaagcacacttatcggtccaaacaaccataacaagtaggaaaaaggatgtaaagttaatttgctaccagaatataacttctttctaacctccactgggttagaaagaaaaatttcccaatgacaatagaacat

SEQ ID NO: 341 - DNA, 422 bp, Homo sapiens
aaaaagctcctcaagtcacagagagcatagagtccagtgagcttgtaaccacttgtcaagccgaaaccttagctggggtaaaatcacaggagatggtgatggaacaggctatcccccctgactcggtggaaacccctacagacagtgagactgatggaagcacccccgtagccgactttgacgcaccaggcacaacccagaaagacgagattgtggaaatccatgaggagaatgaggtcgcatctggtacccagtcagggggcacagaagcagaggcagttcctgcacagaaagagaggcctccagcaccttccagttttgtgttccaggaagaaactaaagaacaatcaaagatggaagacactctagagcatacagataaagaggtgtcagtggaaactgtatccattctgtcaaagact

SEQ ID NO: 342 - DNA, 394 bp, Homo sapiens
  misc_feature 132, 304: n = A,T,C or G
ctgaatccttttattttttaaaggacttttaaaatttgaaactacaaaacggatttcatacattctgccataaataaaaacaaacaataaggcaggactctacataagcaaaccaagaacaattgttttcanaaaatgtgataaaatgctttacaatcataagccatccagtttttaaaataaaactgttgaaaaactcacaaatcttcaagcggcacatacaagacacccttgaagagggaacaaaatgtggttctgccactttgtactgttctcacatttttgaaaacctaattttgcttanagcataggtctgttccgtattctaaaattcacacaggttggtttgttttttctcaagaaccatgtgatagaggcaccaatgacaatacaa

SEQ ID NO: 343 - DNA, 422 bp, Homo sapiens
ctgatttgggggtggtttttagtttaatttttcttttctagcttcccatcgacggtcagtgcgcacgttgtaatcagctgaggccatgtcaggagacggagccacggagcaggcagctgagtatgtcccagagaaggtgaagaaagcggaaaagaaattagaagagaatccatatgaccttgatgcttggagcattctcattcgagaggcacagaatcaacctatagacaaagcacggaagacttatgaacgccttgttgcccagttccccagttctggcagattctggaaactgtacattgaagcagagattaaagctaaaaattatgacaaggttgaaaagctatttcagagatgccttatgaaggttttgcacattgatttatggaagtgttatctttcatatgtccgagaaaccaagg

SEQ ID NO: 344 - DNA, 372 bp, Homo sapiens
  misc_feature 99, 332, 353: n = A,T,C or G
gtgaatataatcatttatttgtctttacagtgatgatggaagaatgtacaggtgtcccctttcaataaagtataaaaatatgtttatatacagtgaagncacaataatctttaactgggaaatttatttagaattcctgatctgttcttattaaaactgtgggggaaacaaatgttttacgtaagtgctacatttccagtagattgcacctggcatcaaaagctcagcttcatcttagggtcctgcttgatattacaaaagactaattttaagtcctaggactcaaaataaacatgattttttgaataatagatatatacatcaaaaatacntctaaaaaggcattggttagngctattaaaaagctctatg

SEQ ID NO: 345 - DNA, 422 bp, Homo sapiens
  misc_feature 414, 420: n = A,T,C or G
ggaagaaggaggaagtgatccgaaaatctgggctaagtgctggcaagagcgatgtctactacttcagtccaagtggtaagaagttcagaagcaagcctcagttggcaaggtacctgggaaatactgttgatctcagcagttttgacttcagaactggaaagatgatgcctagtaaattacagaagaacaaacagagactgcgaaacgatcctctcaatcaaaataagggtaaaccagacttgaatacaacattgccaattagacaaacagcatcaattttcaaacaaccggtaaccaaagtcacaaatcatcctagtaataaagtgaaatcagacccacaacgaatgaatgaacagccacgtcagcttttctgggagaagaggctacaaggacttagtgcatcagatgtaacanaacaantt

SEQ ID NO: 346 - DNA, 370 bp, Homo sapiens
  misc_feature 1, 5, 61, 76, 83, 90, 119, 141, 188, 215, 231, 267, 330, 341: n = A,T,C or G
naagngaagcaaatattttatttaaatcagtcgtcaaatcacaacttatccaaatgaatgngttgcaacattgttnttaaaanaatggcncaaatatggcacaaacacaatccagtatntatcaaaataccatttgtaaanaacctgacttatttcatgccatgtgtgaatgcagtccagcatataanagtagaatcaaaaacttacaacaattnttttcttcataacatntaaaacatattcactactttgcctcaggattaagcncacttatcggtccaaacaaccataacaagtaggaaaaaggatgtaaagttaatttgctaccanaatataacttntttctaacctccactgggttagaaagaaa

SEQ ID NO: 347 - DNA, 451 bp, Homo sapiens
  misc_feature 49: n = A,T,C or G
cgcgcctgcaggtcgacactagtggatccaaagtttgtgttccaggaanaaactaaagaacaatcaaagatggaagacactctagagcatacagataaagaggtgtcagtggaaactgtatccattctgtcaaagactgaggggactcaagaggctgaccagtatgctgatgagaaaaccaaagacgtaccatttttcgaaggacttgaggggtctatagacacaggcataacagtcagtcgggaaaaggtcactgaagttgcccttaaaggtgaagggacagaagaagctgaatgtaaaaaggatgatgctcttgaactgcagagtcacgctaagtctcctccatcccccgtggagagagagatggtagttcaagtcgaaagggagaaaacagaagcagagccaacccatgtgaatgaagagaagcttgagcacgaaacagctgttaccg

SEQ ID NO: 348 - DNA, 145 bp, Homo sapiens
  misc_feature 120, 121, 124, 132: n = A,T,C or G
aaaaagctcctcaagtcacagagagcatagagtccagtgagcttgtaaccacttgtcaagccgaaaccttagctggggtaaaatcacaggagatggtgatggaacaggctatcccccctnnctnggctgganacccgttgcatag

SEQ ID NO: 349 - DNA, 162 bp, Homo sapiens
  misc_feature 53, 97, 135, 151, 155: n = A,T,C or G
ggtttaaatactgcactctattttttaaggactctgtgcatggtatttccggnggcagatgtgtaagattttttatgtaaatcgtgttgttttagcngaggactatcagacctgacagcagctggacatccaggncctcactggggtggcnccanacgcaca

SEQ ID NO: 350 - DNA, 421 bp, Homo sapiens
  misc_feature 4: n = A,T,C or G
gcancatcaaccagggcctggaccgcctgcgcagggtcagccaccagggctacagcactgaggctgagttcgaggagcccagggtgattgacctgtgggacctggcgcagtccgccaacctcacggacaaggagctggaggcgttccgggaggagctcaagcacttcgaagccaaaatcgagaagcacaaccactaccagaagcagctggagattgcgcacgagaagctgaggcacgcagagagcgtgggcgacggcgagcgtgtgagccgcagccgcgagaagcacgccctgctggaggggcggaccaaggagctgggctacacggtgaagaagcatctgcaggacctgtccggcaggatctccagagctcggcacaacgaactctgaaggcactggggagcccagcccggcagggaaga

SEQ ID NO: 351 - DNA, 393 bp, Homo sapiens
  misc_feature 197, 287, 290, 307: n = A,T,C or G
aattcaataaacatgtagatttattttaagtcagtttggtacatgatacagattggttttgcagtttttaatgaactgaaatagaaatgtctaaatacagcagtatctgcctgtgcaacaaatatctgtaaggtaaaataaggtatttgatagaagaacatctgcaagaacaaatcagatgaaaaatctgaaaaggnttctatataccttctggattttaaaaaaacccaaaaattaatggctcaagatactacattgctaaagttaggggaaaaaagtaaaaaggntgngagttctgttgcaaganctcatttgtagacttgcaaaatctaactaattttatattatgcttgttgttagagcagtgctcaaaattacagaagcttcaaattg

SEQ ID NO: 352 - DNA, 523 bp, Homo sapiens
ccgacatatgcaagaactatatcagccagtattctgaaattgctatccagatgatgatgcacatgcaacccaaggagatctgtgcgctggttgggttctgtgatgaggtgaaagagatgcccatgcagactctggtccccgccaaagtggcctccaagaatgtcatccctgccctggaactggtggagcccattaagaagcacgaggtcccagcaaagtctgatgtttactgtgaggtgtgtgaattcctggtgaaggaggtgaccaagctgattgacaacaacaagactgagaaagaaatactcgacgcttttgacaaaatgtgctcgaagctgccgaagtccctgtcggaagagtgccaggaggtggtggacacgtacggcagctccatcctgtccatcctgctggaggaggtcaagccctgagctggtgtgcagcatgctgcacctctgctctggcacgcggctgcctgcactgaccgttcacgtgactcagccaaaggacggtggcttctgcgaagtgt

SEQ ID NO: 353 - DNA, 200 bp, Homo sapiens
  misc_feature 31, 53, 68, 177, 194: n = A,T,C or G
cccagaggaatctctacattgctggcttttncttgctgctgtccttcctgctnagacgcctggagacnctcatttcgcagcaggccacgctgctggcctccaatgaagcctttaaaaagcaggcggagagtgctagtgaggcggccaagaagtacatggaggagaatgaccacgctnaagaagggagctgctgntgacgg

SEQ ID NO: 354 - DNA, 375 bp, Homo sapiens
  misc_feature 132, 304: n = A,T,C or G
ctgaatccttttattttttaaaggacttttaaaatttgaaactacaaaacggatttcatacattctgccataaataaaaacaaacaataaggcaggactctacataagcaaaccaagaacaattgttttcanaaaatgtgataaaatgctttacaatcataagccatccagtttttaaaataaaactgttgaaaaactcacaaatcttcaagcggcacatacaagacacccttgaagagggaacaaaatgtggttctgccactttgtactgttctcacatttttgaaaacctaattttgcttanagcataggtctgttccgtattctaaaattcacacaggttggtttgttttttctcaagaaccatgtgataga

SEQ ID NO: 355 - DNA, 403 bp, Homo sapiens
ctgatttgggggtggtttttagtttaatttttcttttctagcttcccatcgacggtcagtgcgcacgttgtaatcagctgaggccatgtcaggagacggagccacggagcaggcagctgagtatgtcccagagaaggtgaagaaagcggaaaagaaattagaagagaatccatatgaccttgatgcttggagcattctcattcgagaggcacagaatcaacctatagacaaagcacggaagacttatgaacgccttgttgcccagttccccagttctggcagattctggaaactgtacattgaagcagagattaaagctaaaaattatgacaaggttgaaaagctatttcagagatgccttatgaaggttttgcacattgatttatggaagtgttatctttca

SEQ ID NO: 356 - DNA, 280 bp, Homo sapiens
  misc_feature 5, 8, 14, 206, 207, 209, 210, 211, 252, 256, 273: n = A,T,C or G
actgntgnactatnttaactcataataaaaagtaactagtcaaaatttagaacattctgatcaaaatgggtctgcacatgcctttcaaacacctgctggtcatagtcaggagggaactgctcgctgcacatcgggcacaccttccagtgactttcaacatgttcttcaaatttgctctgatcatagttaggaggaaacattaactnncnnnaggggacacttcttgtgaacatcaaagctggaatcaaagcnaaancctgtcccattcccacngtaaatg

SEQ ID NO: 357 - DNA, 371 bp, Homo sapiens
  misc_feature 7, 35, 41, 48, 52, 54, 58, 60, 64, 67, 111, 133, 153, 169,188, 195, 213, 221, 242, 262, 280, 295, 303, 308, 321: n = A,T,C or G
cttttancccatcagcttgaggaagatattgtgtnggtttnacttcangcantngaanangagnccnccttagacaaagcacagaggaccccactcaaagaactggacgtntactgtgaggaagtgcgaattnctggtgaagggacagacaangatgaaaaggaacttnataacggacatttaaatantccacanttttgacataccgtgctnatgtctgncgaactccctgtcggaagagngccaggaggtggtggacacntacggcagctccatcctntccatcctgctggangaggtcanccctnagctggtgtgcancatgctgcacctctgctctggcacccggcttgcctgcactgaccgtctac

SEQ ID NO: 358 - DNA, 374 bp, Homo sapiens
  misc_feature 345: n = A,T,C or G
atggaagtctctgatttattccagccaaaatattagatgagccactgagaatcaccacaaagcaatcgccctcacggcccttgccagggtgacggcacagcaggaggacaggtgcccaggccagtggttctagctcttcacctctgcgacctccttctctgccttctctttggccttctccttctcctccaccttctcctctttttccagtgttgctacaatctcagccacctggctggtggagatgtgaacatcttctttgtccaccagctcaatcaccttgacgaggtcgtcgatgttgaccttgccatccttgttttcatccagtgctgcggccaggctggngagcttgctttcgggaatgtgcttgactt

SEQ ID NO: 359 - DNA, 451 bp, Homo sapiens
gcgcgcctgcaggtcgacactagtggatccaaaggtgaaagtggccgaggtggagggcgagcaggtggacaacaaggccaagctggaggccacgctgcaggaggaggcggccatccagcaggagcaccgtgagaaggagctgcagaagcgctcggaggtggcgaaggattttgagcccgaacgtgtggtagctgctccccaaaggccggggaccgagccacagccagaaatgcctgacacagtcctgcagtcagagaccttgaaggacactgccccggtgctggagggcttgaaggaggaagagatcacgaaggaggaaatcgacatcctcagcgatgcctgctctaagctgcaggagcagaagaagtcactcaccaaggagaaggaggagctggagctgctgaaggaggatgtgcaggactacagcgaggacttgcaggagatcaagaag

SEQ ID NO: 360 - DNA, 371 bp, Homo sapiens
  misc_feature 31, 42, 53, 102, 111, 118, 145, 158, 188, 238, 278, 353,357, 359: n = A,T,C or G
actatacaagggtttattaaatacttgctanacacataaaanaacaatttcanagcccacatgattttataaagcttaatggccagccatgtcagcctgctntttaacctntggccanaatgttcctatcacttgccagcgccgngtctttttccttntttcaacaggcaacaagcctgcaaggaggnggagggtttccccacgtcatcgtccaggtcaggacagctcacacagtttnttcaccaagcaaaggcaatgtttaggttcgaatgaggggngctctttcatccgctgttccctcatccatggatccctgtcctttgcatgcaagccaggtaaaaaccaaaccaaanaacncncccagcgccatg

SEQ ID NO: 361 - DNA, 404 bp, Homo sapiens
cccaggtgcacttcctcagggagatcattgaggccatgttgaaagcctatcagcagaagctctttgtgactcacacagttgacgaattgctctggggctacaaagatgaaatcttgtcccttatccatgttttcaggcccgatatctctccctattttggcctattctatgagaaaaatgggactaatgatggagactatgtttttctaactggagaagacagttaccttaactttacaaaaattgtggaatggaatgggaaaacgtcacttgactggtggataacagacaagtgcaatatgattaatggaacagatggagattcttttcacccactaataaccaaagatgaggtcctttatgtcttcccatctgacttttgcaggtcagtgtatattactttc

SEQ ID NO: 362 - DNA, 474 bp, Homo sapiens
  misc_feature 50, 83, 88, 295, 362, 430, 443, 465: n = A,T,C or G
gagcttgccatccatatttatttgaaaaggtcaaaaggagcatctatganacaagggaggggtgcaggctgaaacaacgcctnaacanccagggacatgtaggcaacacgagcaggcacagcgcggccaccactgtccacacgctcacacaagccaggcccgcagggccttcggagagctagcaggttacattcaggcagatggccctcttcccacccaaacccacagaaccccaaacaaggcatcaccaggaaagacacgggaaagccaaatcacagttgaaccagggacaganaacccttggccccactgatgtcccaagccaccagcagctgcttccaaaatccctatgctattacagngggaattacatcatttaaaaagcctgattattccaggcttctaatctttcatataaaactgcctttgntttgctgctttgntcaactgagaggcccaggaaancggggaggg

SEQ ID NO: 363 - DNA, 564 bp, Homo sapiens
ccgacatatgcaagaactatatcagccagtattctgaaattgctatccagatgatgatgcacatgcaacccaaggagatctgtgcgctggttgggttctgtgatgaggtgaaagagatgcccatgcagactctggtccccgccaaagtggcctccaagaatgtcatccctgccctggaactggtggagcccattaagaagcacgaggtcccagcaaagtctgatgtttactgtgaggtgtgtgaattcctggtgaaggaggtgaccaagctgattgacaacaacaagactgagaaagaaatactcgacgcttttgacaaaatgtgctcgaagctgccgaagtccctgtcggaagagtgccaggaggtggtggacacgtacggcagctccatcctgtccatcctgctggaggaggtcagccctgagctggtgtgcagcatgctgcacctctgctctggcacgcggctgcctgcactgaccgttcacgtgactcagccaaaggacggtggcttctgcgaagtgtgcaagaagctggtgggttatttggatcgcaacctggagaaaa

SEQ ID NO: 364 - DNA, 405 bp, Homo sapiens
agactatggagtctgacatctacaccgaggtccgcgagctggtgagcctcaagcaggagcagcaggctttcaaggaggcggccgacacggagcggctcgccctgcaggccctcacggagaagcttctcaggtctgaggagtccgtctcccgcctcccggaggagatccggagactggaggaagagctccgccagctgaagtccgattcccacgggccgaaggaggacggaggcttcagacactcggaagcctttgaggcactccagcaaaagagtcagggactggactccaggctccagcacgtggaggatggggtgctctccatgcaggtggcttctgcgcgccagaccgagagcctggagtccctcctgtccaagagccaggagcacgagcagcgcctggccg

SEQ ID NO: 365 - DNA, 373 bp, Homo sapiens
  misc_feature 114, 132, 160, 199, 349: n = A,T,C or G
aggaacagaaaatttattattatgcaactagcaagctggggtcaaagggctttcccaaaaaaagttgtgtttccctatattacaggtaccaaaacagagcaaaacatccagganaaccaaactgaaactcanaaaagagacaatttctgaggcccaccanatcctgattccattttgaaatactctattgcagtacctntgggtaaatattagctggttgctaaagacaggatctgaggctgggccaattcttaaggcaccagctgtcttgaggaggaagatgaagactgtgaatgaaggacagcagacttgcttctaggaaaataatatatgtaagttgggatgcctnttgcagccagatgtttccgaataa

SEQ ID NO: 366 - DNA, 251 bp, Homo sapiens
  misc_feature 38, 106, 122, 153, 184, 193, 196, 201, 208, 209, 210, 223,226, 240, 248: n = A,T,C or G
gaagtcgctcaacatttcatttttaatttttctaatantacattctttaaaagaagttaacgacttcaattccaaatataaggattaaataatgcaatgaaaagcngtcattttcagtgaanctattgcctaattaccctggaaaaaagtatncttatgactgaactgatgcaaaaatcccttntaaaagctntantcggntgcctgnnnacagtcttcttanggncgctcttacagatnaacagccncct

SEQ ID NO: 367 - DNA, 407 bp, Homo sapiens
  misc_feature 369: n = A,T,C or G
ccaatgctcagctagacaatgaaaagacaaacttcatgtaccaggttgataccctaaaagatatgttgctggagcttgaagaacagctggctgaatctaggcggcagtacgaagagaaaaacaaagaatttgaaagggaaaaacacgcccacagtatactgcaatttcagtttgctgaagtcaaggaggccctgaagcaaagagaggaaatgctcgagaaacatggaataatcctaaattcagaaatagctaccaatggagagacttccgacaccctcaataatgttggataccaaggtcctaccaagatgacaaaagaagagttaaatgccctcaagtcgacaggggatgggaccctagatattaggntgaaaaagctggttgatgaacgggaatgcttattggaa

SEQ ID NO: 368 - DNA, 574 bp, Homo sapiens
  misc_feature 32, 130, 157, 203, 290, 296, 422, 489: n = A,T,C or G
ctggctaacagaattttattgttaaatcacanaaactttagtgcaaaacaaaaatcacgaagtccatttaatagcaacttcatgtcctgctggctttgcttgctgtctcctggcaaccagaagtggacanaagcgtgggtgcccaagtgggccacanacagcttccaacccccacaccccagcatccaatccacacccagcanacccttcggcatgccgccctctaccaggaagccagaggcctaggagctcgccatccatatttatttgaaaaggtcaaaaggagcatntatganacaagggaggggtgcaggctgaagcagcgcctcaacagccagggacatgtaggcaacacgagcaggcacagcgcggccaccactgtccacacgctcacacaagccaggcccgcagggccttcgganagctagcaggttacattcaggcagatggccctcttcccacccaaacccacagaaccccaaacaaggnatcaccaggaaagacacgggaaagccaaatcacagttgaaccagggacagagaacccttggccccactgatgtcccaagccacca

SEQ ID NO: 369 - DNA, 593 bp, Homo sapiens
gggacgtttgccaggactgcattcagatggtgactgacatccagactgctgtacggaccaactccacctttgtccaggccttggtggaacatgtcaaggaggagtgtgaccgcctgggccctggcatggccgacatatgcaagaactatatcagccagtattctgaaattgctatccagatgatgatgcacatgcaacccaaggagatctgtgcgctggttgggttctgtgatgaggtgaaagagatgcccatgcagactctggtccccgccaaagtggcctccaagaatgtcatccctgccctggaactggtggagcccattaagaagcacgaggtcccagcaaagtctgatgtttactgtgaggtgtgtgaattcctggtgaaggaggtgaccaagctgattgacaacaacaagactgagaaagaaatactcgacgcttttgacaaaatgtgctcgaagctgccgaagtccctgtcggaagagtgccaggaggtggtggacacgtacggcagctccatcctgtccatcctgctggaggaggtcagccctgagctggtgtgcagcatgctgcacctctgctctggcacgcgg

SEQ ID NO: 370 - DNA, 404 bp, Homo sapiens
acggcccccgcagcaagccccagccaaaggataatggggacgtttgccaggactgcattcagatggtgactgacatccagactgctgtacggaccaactccacctttgtccaggccttggtggaacatgtcaaggaggagtgtgaccgcctgggccctggcatggccgacatatgcaagaactatatcagccagtattctgaaattgctatccagatgatgatgcacatgcaacccaaggagatctgtgcgctggttgggttctgtgatgaggtgaaagagatgcccatgcagactctggtccccgccaaagtggcctccaagaatgtcatccctgccctggaactggtggagcccattaagaagcacgaggtcccagcaaagtctgatgtttactgtgaggtg

SEQ ID NO: 371 - DNA, 533 bp, Homo sapiens
  misc_feature 45, 290, 357, 447: n = A,T,C or G
cgccatccatatttatttgaaaaggtcaaaaggagcatctatganacaagggaggggtgcaggctgaagcagcgcctcaacagccagggacatgtaggcaacacgagcaggcacagcgcggccaccactgtccacacgctcacacaagccaggcccgcagggccttcggagagctagcaggttacattcaggcagatggccctcttcccacccaaacccacagaaccccaaacaaggcatcaccaggaaagacacgggaaagccaaatcacagttgaaccagggacaganaacccttggccccactgatgtcccaagccaccagcagctgcttccaaaatccctatgctattacagngggaattacatcatttaaaaagcctgattattccaggcttctaatctttcatataaaactgcctttgttttgctgctttgttcaactganaggcccaggaaagcggggagggtccctgatcagggcaggaggccacctcagaagcccaggcccaccagtgcccaagcacatgtcag

SEQ ID NO: 372 - DNA, 571 bp, Homo sapiens
ccgcggcagacggcgaggacggacaggacccgcacagcaagcacctgtacacggccgacatgttcacgcacgggatccagagcgccgcgcacttcgtcatgttcttcgcgccctggtgtggacactgccagcggctgcagccgacttggaatgacctgggagacaaatacaacagcatggaagatgccaaagtctatgtggctaaagtggactgcacggcccactccgacgtgtgctccgcccagggggtgcgaggataccccaccttaaagcttttcaagccaggccaagaagctgtgaagtaccagggtcctcgggacttccagacactggaaaactggatgctgcagacactgaacgaggagccagtgacaccagagccggaagtggaaccgcccagtgcccccgagctcaagcaagggctgtatgagctctcagcaagcaactttgagctgcacgttgcacaaggcgaccactttatcaagttcttcgctccgtggtgtggtcactgcaaagccctggctccaacctgggagcagctggctctgggccttgaacattccgaaactgt

SEQ ID NO: 373 - DNA, 346 bp, Homo sapiens
  misc_feature 21, 66, 112, 221, 233, 255, 269, 290, 292, 294, 304, 305,310, 312, 316, 319, 324, 338: n = A,T,C or G
aaaaaaaaagagtttatttanaaagtatcatagtgtaaacaaacaaattgtaccactttgattttnttggaatacaagactcgtgatgcaaagctgaagttgtgtgtacaanactcttgacagttgtgcttctctaggaggttgggtttttttaaaaaaagaattatctgtgaaccatacgtgattaataaagatttcctttaaggcgctaggctggtcgngatgctggtgtnatcttctgcctcagacagacantataagtggacttngttataaaattcctaccaccngntnctttgggccnngtatncncatnccnttgcntatgggaggagggngaagagac

SEQ ID NO: 374 - DNA, 576 bp, Homo sapiens
  misc_feature 3, 4, 39, 516, 526: n = A,T,C or G
ccnncttaaagcttttcaagccaggccaagaagctgtgnagtaccagggtcctcgggacttccagacactggaaaactggatgctgcagacactgaacgaggagccagtgacaccagagccggaagtggaaccgcccagtgcccccgagctcaagcaagggctgtatgagctctcagcaagcaactttgagctgcacgttgcacaaggcgaccactttatcaagttcttcgctccgtggtgtggtcactgcaaagccctggctccaacctgggagcagctggctctgggccttgaacattccgaaactgtcaagattggcaaggttgattgtacacagcactatgaactctgctccggaaaccaggttcgtggctatcccactcttctctggttccgagatgggaaaaaggtggatcagtacaagggaaagcgggatttggagtcactgagggagtacgtggagtcgcagctgcagcgcacagagactggagcgacggagaccgtcacgccctcanaggccccggngctggcagctgagcccgaggctgacaagggcactgtgttggcactcactg

SEQ ID NO: 375 - DNA, 594 bp, Homo sapiens
  misc_feature 8, 9, 11, 41, 51, 221, 246, 276, 341: n = A,T,C or G
aaaaaaanngnttttatttagaaagtatcatagtgtaaacnaacaaattgnaccactttgattttcttggaatacaagactcgtgatgcaaagctgaagttgtgtgtacaagactcttgacagttgtgcttctctaggaggttgggtttttttaaaaaaagaattatctgtgaaccatacgtgattaataaagatttcctttaaggcagaggctggtcganatgctgctgttatcttctgcctcanacagacagtataagtggtcttgtttctaanattcctaccaccagttactttgggccaagtatccacatccccttgcgtatgggaggtgggtgaanagtgttggatgcaaagtggttattatgggaagtagctcgatggtaaaaggacaaacacctatctatcttagagcttaagcctgtatgtgcttattcccaagggagatagaggtgtttaatcacaaggacagcatgagttagaggacactggcatcaacagctgccacagccgtgcacaccagggccagagcagcccactgacatctgtctttggtcttgagatcaaatgcatcccattcttcatacattagaa

SEQ ID NO: 376 - DNA, 608 bp, Homo sapiens
ccgacatatgcaagaactatatcagccagtattctgaaattgctatccagatgatgatgcacatgcaacccaaggagatctgtgcgctggttgggttctgtgatgaggtgaaagagatgcccatgcagactctggtccccgccaaagtggcctccaagaatgtcatccctgccctggaactggtggagcccattaagaagcacgaggtcccagcaaagtctgatgtttactgtgaggtgtgtgaattcctggtgaaggaggtgaccaagctgattgacaacaacaagactgagaaagaaatactcgacgcttttgacaaaatgtgctcgaagctgccgaagtccctgtcggaagagtgccaggaggtggtggacacgtacggcagctccatcctgtccatcctgctggaggaggtcagccctgagctggtgtgcagcatgctgcacctctgctctggcacgcggctgcctgcactgaccgttcacgtgactcagccaaaggacggtggcttctgcgaagtgtgcaagaagctggtgggttatttggatcgcaacctggagaaaaacagcaccaagcaggagatcctggctgctcttgagaaaggctgc

SEQ ID NO: 377 - DNA, 393 bp, Homo sapiens
tgaccttgatgcttggagcattctcattcgagaggcacagaatcaacctatagacaaagcacggaagacttatgaacgccttgttgcccagttccccagttctggcagattctggaaactgtacattgaagcagagattaaagctaaaaattatgacaaggttgaaaagctatttcagagatgccttatgaaggttttgcacattgatttatggaagtgttatctttcatatgtccgagaaaccaagggtaaactaccaagttacaaagaaaaaatggctcaagcatatgactttgcactggataaaattggaatggaaattatgtcctatcagatttgggtggattacatcaatttcctaaaaggcgtggaagctgtaggatcttatgcaga

SEQ ID NO: 378 - DNA, 489 bp, Homo sapiens
cagggggcacagaagcagaggcagttcctgcacagaaagagaggcctccagcaccttccagttttgtgttccaggaagaaactaaagaacaatcaaagatggaagacactctagagcatacagataaagaggtgtcagtggaaactgtatccattctgtcaaagactgaggggactcaagaggctgaccagtatgctgatgagaaaaccaaagacgtaccatttttcgaaggacttgaggggtctatagacacaggcataacagtcagtcgggaaaaggtcactgaagttgcccttaaaggtgaagggacagaagaagctgaatgtaaaaaggatgatgctcttgaactgcagagtcacgctaagtctcctccatcccccgtggagagagagatggtagttcaagtcgaaagggagaaaacagaagcagagccaacccatgtgaatgaagagaagcttgagcacgaaacagctgttaccgtatctgaag

SEQ ID NO: 379 - DNA, 245 bp, Homo sapiens
  misc_feature 158, 228: n = A,T,C or G
ttcagatggtgactgacatccagactgctgtacggaccaactccacctttgtccaggccttggtggaacatgtcaaggaggagtgtgaccgcctgggccctggcatggccgacatatgcaagaactatatcagccagtattctgaaattgctatccanatgatgatgcacatgcaacccaaggagatctgtgccgctggttgggttctgtgatgaggcgaaacagatncccatgcacactctggt

SEQ ID NO: 380 - DNA, 536 bp, Homo sapiens
  misc_feature 32, 45, 64, 75, 78, 111, 119, 144, 177, 201, 210, 229, 244,247, 257, 260, 294, 337, 363, 375, 404, 444, 461, 462, 502: n = A,T,C or G
ggagcttgccatccatatttatttgaaaaggncaaaaggagcatntatgaaacaagggaggggngcaggctgaancancgcctcaacagccagggacatgtaggcaacacnagcaggcncagcgcggccaccactgtccacacnctcacacaagccaggcccgcagggccttcgganagctagcaggttacattcaggcanatggccctnttcccacccaaacccacanaaccccaaacaaggnatnaccaggaaanacncgggaaagccaaatcacagttgaaccagggacanaaaacccttggccccactgatgtcccaagccaccagcagctgnttccaaaatccctatgctattacagngggaattacatnatttaaaaagcctgattattccaggcttntaatctttcatataaaactgcctttgttttgctgctttgntcaactgaaaggcccannaaagcggggagggtccctgatcagggcaggaggccacctnaaaagcccaggcccaccagtgcccaagcacatgt

SEQ ID NO: 381 - DNA, 634 bp, Homo sapiens
cctccaagaatgtcatccctgccctggaactggtggagcccattaagaagcacgaggtcccagcaaagtctgatgtttactgtgaggtgtgtgaattcctggtgaaggaggtgaccaagctgattgacaacaacaagactgagaaagaaatactcgacgcttttgacaaaatgtgctcgaagctgccgaagtccctgtcggaagagtgccaggaggtggtggacacgtacggcagctccatcctgtccatcctgctggaggaggtcagccctgagctggtgtgcagcatgctgcacctctgctctggcacgcggctgcctgcactgaccgttcacgtgactcagccaaaggacggtggcttctgcgaagtgtgcaagaagctggtgggttatttggatcgcaacctggagaaaaacagcaccaagcaggagatcctggctgctcttgagaaaggctgcagcttcctgccagacccttaccagaagcagtgtgatcagtttgtggcagagtacgagcccgtgctgatcgagatcctggtggaggtgatggatccttccttcgtgtgcttgaaaattggagcctgcccctcggcccataagcccttgttgggaactgagaagtgtatatggggccc

SEQ ID NO: 382 - DNA, 405 bp, Homo sapiens
gtgactttgagaaagatgatgatgcctataagactgaggacagcgatgacatccattttgaaccagtagttcaaatgcctgaaaaagtagaacttgtaacaggagaagaaggtgaaaaagttctgtattcacagggggtaaaactatttagatttgatgctgaggtaaggcagtggaaagaaaggggcttggggaacttaaaaattctcaaaaacgaggtcaatggcaaactaagaatgctgatgcgaagagaacaagtactaaaagtgtgtgctaatcattggataacgactacaatgaacctgaagcccctctctggatcagatagagcatggatgtggtcagccagtgatttctctgacggtgatgccaaactagagcggttggcagcaaaatttaaaacac

SEQ ID NO: 383 - DNA, 362 bp, Homo sapiens
  misc_feature 32, 45, 64, 75, 78, 111, 113, 144, 177, 201, 210, 229, 244,247, 257, 294, 330: n = A,T,C or G
ggagcttgccatccatatttatttgaaaaggncaaaaggagcatntatgaaacaagggaggggngcaggctgaancancgcctcaacagccagggacatgtaggcaacacnancaggcacagcgcggccaccactgtccacacnctcacacaagccaggcccgcagggccttcgganagctagcaggttacattcaggcanatggccctnttcccacccaaacccacanaaccccaaacaaggnatnaccaggaaanacacgggaaagccaaatcacagttgaaccagggacanaaaacccttggccccactgatgtcccaagccaccancagctgcttccaaaatccctatgctattacag

SEQ ID NO: 384 - DNA, 407 bp, Homo sapiens
cctccaagaatgtcatccctgccctggaactggtggagcccattaagaagcacgaggtcccagcaaagtctgatgtttactgtgaggtgtgtgaattcctggtgaaggaggtgaccaagctgattgacaacaacaagactgagaaagaaatactcgacgcttttgacaaaatgtgctcgaagctgccgaagtccctgtcggaagagtgccaggaggtggtggacacgtacggcagctccatcctgtccatcctgctggaggaggtcagccctgagctggtgtgcagcatgctgcacctctgctctggcacgcggctgcctgcactgaccgttcacgtgactcagccaaaggacggtggcttctgcgaagtgtgcaagaagctggtgggttatttggatcgcaacctg

SEQ ID NO: 385 - DNA, 451 bp, Homo sapiens
  misc_feature 191, 309, 437: n = A,T,C or G
taccccacccgggtggaaaatcgatgggcccgcggccgctctagaagtactctcgagttttttttttttttttaccgggcaccaacgttggttttaatggcatcaacacccaggaggtcacacgtcagttctggttggcaacgtctaggggtgaggggctgtggcctccagtcggccccacagcctttganaactggctgcccggtcccacccgcttcccgccccgccccactgaaaaaacactaaacgattgcactgacagacagaccccagagcgcccggcctcccacacacccacggggctgtcanagtcaaccagggctttggcgtcactcggcggtggcccggggctgcgcccaggatagtgtttatcaaatgtgacacaggttcatttacaaactggggctctggaaggtctacttctgtggctctaaganacttgtctctcatg

SEQ ID NO: 386 - DNA, 405 bp, Homo sapiens
cccaggagcaacagcagcagatggccgagctgcacagcaagttacagtcctccgaggcggaggtgcgcagcaaatgcgaggagctgagtggcctccacgggcagctccaggaggccagggcggagaactcccagctcacagagagaatccgttccattgaggccctgctggaggcgggccaggcgcgggatgcccaggacgtccaggccagccaggcggaggctgaccagcagcagactcgcctcaaggagctggagtcccaggtgtcgggtctggagaaggaggccatcgagctcagggaggccgtcgagcagcagaaagtgaagaacaatgacctccgggagaagaactggaaggccatggaggcactggccacggccgagcaggcctgcaaggagaagctgc

SEQ ID NO: 387 - DNA, 334 bp, Homo sapiens
  misc_feature 132, 160, 271, 283, 286, 290, 319: n = A,T,C or G
aggaacagaaaatttattattatgcaactagcaagctggggtcaaagggctttcccaaaaaaagttgtgtttccctatattacaggtaccaaaacagagcaaaacatccaggagaaccaaactgaaactcanaaaagagacaatttctgaggcccaccanatcctgattccattttgaaatactctattgcagtacctctgggtaaatattagctggttgctaaagacaggatctgaggctgggccaattcttaaggcaccagctgtcttnaggaggaagatnaanactntgaatgaaggacagcacacttgcttctangaaaataatatatgt

SEQ ID NO: 388 - DNA, 406 bp, Homo sapiens
gtgactttaatcctcagaatgacttgcaagcagctgccagggctcatcgcattggccaaaacaagtctgttaaagttattcggctgattggtcgagacactgtggaagaaatagtctataggaaagcagcctccaaactgcagctcaccaacatgatcatagaaggaggccattttactctgggagcccagaaacccgctgccgatgctgacctccagttgagtgagatactcaaatttggtttggataaactgctggcctctgaggggagcaccatggatgaaatagacctggagtccatcctgggagaaacaaaagatggccagtgggtctctgatgccttgcctgcagcagaaggagggagcagagatcaagaggaaggaaaaaatcatatgtacttatttga

SEQ ID NO: 389 - DNA, 340 bp, Homo sapiens
  misc_feature 7, 8, 78, 112, 142, 276, 307: n = A,T,C or G
aaaaaannagagtttatttagaaagtatcatagtgtaaacaaacaaattgtaccactttgattttcttggaatacaanactcgtgatgcaaagctgaagttgtgtgtacaanactcttgacagttgtgcttctctaggaggntgggtttttttaaaaaaagaattatctgtgaaccatacgtgattaataaagatttcctttaaggcagaggctggtcgagatgctgctgttatcttctgcctcagacagacagtataagtggtcttggttctaanattcctaccaccagttactttgggccaagtntccacatccccttgcgtatgggaggggggtgaa

SEQ ID NO: 390 - DNA, 404 bp, Homo sapiens
gcacggcccactccgacgtgtgctccgcccagggggtgcgaggataccccaccttaaagcttttcaagccaggccaagaagctgtgaagtaccagggtcctcgggacttccagacactggaaaactggatgctgcagacactgaacgaggagccagtgacaccagagccggaagtggaaccgcccagtgcccccgagctcaagcaagggctgtatgagctctcagcaagcaactttgagctgcacgttgcacaaggcgaccactttatcaagttcttcgctccgtggtgtggtcactgcaaagccctggctccaacctgggagcagctggctctgggccttgaacattccgaaactgtcaagattggcaaggttgattgtacacagcactatgaactctgctcc

SEQ ID NO: 391 - DNA, 376 bp, Homo sapiens
  misc_feature 183, 193, 194, 196, 334: n = A,T,C or G
aaaaatatacagttttaatagaaatattaaaataatcattacacttcctctcattgcagaaaccatgaaagaatatgccttttgtaatcaaagtaattttttatcatgcaaaaaagtattttgttatgacattcgtaagtggagactgtatttcaaaacaagtttatacagacttcaaaaggnctaaagtcanngngaaatatatttaaatatgattagttacatctaatgcagctggcatactcatattcacagtttataaagtaaaaaaactaaactcttcatgtcggctctgaaatagatgcattttcattcatacattcgctagttaggnctgttcttctaaggaggaaagacgagatatatgagatatttt

SEQ ID NO: 392 - DNA, 408 bp, Homo sapiens
  misc_feature 38: n = A,T,C or G
ctgcgatggactggctgatggagcacgaagacgacccntatgtggacgagcctttagagactccccttggacatatcctgggacgggagcccacttcctcagagcaaggcggccttgaaggatctggttctgctgccggagaaggcaaacccgctttgagtgaagaggaaagacaggaacaaactaagaggatgttggagctggtggcccagaagcagcgggagcgtgaagaaagagaggaacgggaggcattggaacgggaacggcagcgcaggagacaagggcaagagttgtcagcagcacgacagcggctacaggaagatgagatgcgccgggctgctgaggagaggcggagggaaaaggccgaggagttagcagccagacaaagagttagagaaaagatcgaga

SEQ ID NO: 393 - DNA, 404 bp, Homo sapiens
cctggtcctcgcctcctccgctgtctccctggagttcttgcaagtcggccaggatgtctcaggctgagtttgagaaagctgcagaggaggttaggcaccttaagaccaagccatcggatgaggagatgctgttcatctatggccactacaaacaagcaactgtgggcgacataaatacagaacggcccgggatgttggacttcacgggcaaggccaagtgggatgcctggaatgagctgaaagggacttccaaggaagatgccatgaaagcttacatcaacaaagtagaagagctaaagaaaaaatacgggatatgagagactggatttggttactgtgccatgtgtttatcctaaactgagacaatgccttgtttttttctaataccgtggatggtgggaatt

SEQ ID NO: 394 - DNA, 316 bp, Homo sapiens
  misc_feature 4, 31, 32, 54, 58, 63, 74, 88, 97, 105, 111, 147, 157, 159,165, 178, 209, 220, 237, 259, 261, 273, 284, 293, 297: n = A,T,C or G
tggnaccccacccgggtggaaaatacgaggnnccaaagaattctgctacgaagntttntcctntcctcctccgntgtctccctggagnggttgcaantcggacangatgtntcaggctgactttgagaaagctgcagaggaggttangcaccttaanancaagcnatcggatgagganatgctgttcatctatggccactacaaacaancaactgtgggngacataaatacagaacngcccgggatgttggacttcacngncaaggccaagtngggatgcctgnaatgacctnaaanggacttccaaggaagatgc

SEQ ID NO: 395 - DNA, 406 bp, Homo sapiens
tgcaatctttcagacaggatgttgacaatgcgtctctggcacgtcttgaccttgaacgcaaagtggaatctttgcaagaagagattgcctttttgaagaaactccacgaagaggaaatccaggagctgcaggctcagattcaggaacagcatgtccaaatcgatgtggatgtttccaagcctgacctcacggctgccctgcgtgacgtacgtcagcaatatgaaagtgtggctgccaagaacctgcaggaggcagaagaatggtacaaatccaagtttgctgacctctctgaggctgccaaccggaacaatgacgccctgcgccaggcaaagcaggagtccactgagtaccggagacaggtgcagtccctcacctgtgaagtggatgcccttaaaggaaccaatga

SEQ ID NO: 396 - DNA, 513 bp, Homo sapiens
  misc_feature 480, 500, 510: n = A,T,C or G
ccgacgtgctattaactcacggacgacaacttcgagagtcgcatctccgacacgggctctgcgggcctcatgctcgtcgagttcttcgctccctggtgtggacactgcaagagacttgcacctgagtatgaagctgcagctaccagattaaaaggaatagtcccattagcaaaggttgattgcactgccaacactaacacctgtaataaatatggagtcagtggatatccaaccctgaagatatttagagatggtgaagaagcaggtgcttatgatggacctaggactgctgatggaattgtcagccacttgaagaagcaggcaggaccagcttcagtgcctctcaggactgaggaagaatttaagaaattcattagtgataaagatgcctctatagtaggttttttcgatgattcattcagtgaggctcactccgagttcctaaaagcagccagcaacttgagggataactaccgattngcacatacgaatgttgagtnctggtgaacnaag

SEQ ID NO: 397 - DNA, 516 bp, Homo sapiens
  misc_feature 13, 340, 505: n = A,T,C or G
ctccgacaagttnaagaactgaagaagaaagatcaggaggatgatgaacaacaaagactcaataagagaaaggatcacaaaaaagcagatgttgaggaagaaataaaaataccagtagtgtgtgctttaactcaagaagaatcttcagcccagttatcaaatgaagaggagcatttagacagcacccgtggctcagttcattccttagatgcaggcttgctgttgccatctggagatcctttcagtaaatcggacaatgacatgtttaaagatggactcaggagagcacagtctacagacagcttgggaacctcgggctcattgcaatccaaagctttangctataactacaaagcaaaatctgctggaaacctggacgagtcagattttggaccactggtaggagcagattcagtgtctgagaactttgatactgcatcccttgggtcactccagatgccaagtgggtttatgttaaccaaagatcagggaaagagcaatcaangcgatgacacc

SEQ ID NO: 398 - DNA, 514 bp, Homo sapiens
  misc_feature 381, 472, 504: n = A,T,C or G
gcttcgccaactacatcgacaaggtgcgcttcctggagcagcagaataagatcctgctggccgagctcgagcagctcaagggccaaggcaagtcgcgcctgggggacctctacgaggaggagatgcgggagctgcgccggcaggtggaccagctaaccaacgacaaagcccgcgtcgaggtggagcgcgacaacctggccgaggacatcatgcgcctccgggagaaattgcaggaggagatgcttcagagagaggaagccgaaaacaccctgcaatctttcagacaggatgttgacaatgcgtctctggcacgtcttgaccttgaacgcaaagtggaatctttgcaagaagagattgcctttttgaagaaactccacgaanaggaaatccaggagctgcaggctcagattcaggaacagcatgttcaaatcgatgtggatgtttccaagcctgacctccggctgccctgcgngacgtacgtcagcaatatgaaagtgtggctgncaaaaacctg

SEQ ID NO: 399 - DNA, 209 bp, Homo sapiens
  misc_feature 167: n = A,T,C or G
ccatggcagtgaccaaggagctcttacagatggacctgtacgcgctgctaggcattgaggagaaggcagcggacaaagaggtaaagaaggcgtataggcagaaggccctctcctgccacccagacaaaaatccagataatcccagagcagctgaactcttccaccanctatctcacgccttggaggtgctgaccgatgctgcagccatg

SEQ ID NO: 400 - DNA, 297 bp, Homo sapiens
gccccatgaagaactacctgaagaagcaggtcacacccctcttcattcacttcagaaataataccaacaactggagggagatcccagaaaacctgatggaccagtacagcgaggttaatgccatcagcaccgcctgctccaacggagttccagagtgtgaggagatggtctctggccttttcaagcagtggatggagaaccccaataataacccgatccaccccaacctgcggtccaccgtctactgcaacgctatcgcccagggcggggaggaggagtgggacttcgcctgggagc

SEQ ID NO: 401 - DNA, 534 bp, Homo sapiens
  misc_feature 12, 469, 477, 483, 517: n = A,T,C or G
aaagaaaggggnttggggaacttaaaaattctcaaaaatgaggtcaatggcaaaccaagaatgctgatgcgaagagaccaagtactaaaagtgtgtgctaatcattggataacaactacaatgaacctgaagcccctctctggatcagatagagcatggatgtggttagccagtgatttctctgatggtgatgccaaactagagcggttggcagcacaatttaaaacaccagagctggctgaagaattcaagcagaaatttgaggaatgccagcggcttctgttagacataccacttcaaactccccataaacttgtagatactggcagagcttgccaagctaatacagagagctgaagaaatgaagagtggactgaaagatttcaaaaccgtttttgacaaatgatcaaacaaaagtcactgaggaagaaaataagggtttcaggtacaggtgcagccggtgcctcanacacaacnaataanaccccaatcctgaaaacacctgggcccacattanaatgggataactatgat

SEQ ID NO: 402 - DNA, 403 bp, Homo sapiens
  misc_feature 268, 288, 355, 361, 394: n = A,T,C or G
ccatcccagacgaagacagtccctggatcaccgacagcacagacagaatccctgctaccagagaccaagacacattccaccccagtggggggtcccataccactcatggatctgaatcagatggacactcacatgggagtcaagaaggtggagcaaacacaacctctggtcctataaggacaccccaaattccagaatggctgatcatcttggcatccctcttggccttggctttgattcttgcagtttgcattgcagtcaacagtcngaagaaggtgtgggcagaanaaaaagctagtgatcaacagtggcaatggagctgtggaggacagaaagccaagcggactcaacgganaggccncaagtctcaggaaatggtgcatttggtgaactnggagtcgtc

SEQ ID NO: 403 - DNA, 590 bp, Homo sapiens
ccacctcgatggacagaagatcggaattctttactgaatatgatttgccaacaagtagaggccattaagaaagaaatgcaggagttgaaactaaatagcagtaagtcagcatcccgtcatcgttggcccacagagaattatggaccagactcggtgcctgatggatatcaggggtcacagacatttcatggggctccactaacagttgcaactactggcccttcagtatattatagtcagtcaccagcatataattcccagtatcttctcagaccagcagctaatgttactcccacaaagggttcttctaatacagaatttaagtcaaccaaagaaggattttccatccctgtgtctgctgatggatttaaatttggcatttcggaaccaggaaatcaagaaaagaaaagggaaaagcctcttgaaaatgatactggcttccaggctcaggatattagtggccggaagaagggccgtggtgtgatttttggccaaacaagtagcacttttacatttgcagatgttgcaaaatcaacttcaggagaaggatttcagtttggcaaaaaagacctcaatttcaagggattttc

SEQ ID NO: 404 - DNA, 64 bp, Homo sapiens
  misc_feature 28, 37, 59: n = A,T,C or G
ccgactccccagacaccacagaggaggncactccggngcaggaggtggaaggtggcgtncctga

SEQ ID NO: 405 - DNA, 395 bp, Homo sapiens
aactggtggagcccattaagaagcacgaggtcccagcaaagtctgatgtttactgtgaggtgtgtgaattcctggtgaaggaggtgaccaagctgattgacaacaacaagactgagaaagaaatactcgacgcttttgacaaaatgtgctcgaagctgccgaagtccctgtcggaagagtgccaggaggtggtggacacgtacggcagctccatcctgtccatcctgctggaggaggtcagccctgagctggtgtgcagcatgctgcacctctgctctggcacgcggctgcctgcactgaccgttcacgtgactcagccaaaggacggtggcttctgcgaagtgtgcaagaagctggtgggttatttggatcgcaacctggagaaaaacagcacc

SEQ ID NO: 406 - DNA, 514 bp, Homo sapiens
tggacttctcgctggccgacgccatcaacaccgagttcaagaacacccgcaccaacgagaaggtggagctgcaggagctgaatgaccgcttcgccaactacatcgacaaggtgcgcttcctggagcagcagaataagatcctgctggccgagctcgagcagctcaagggccaaggcaagtcgcgcctgggggacctctacgaggaggagatgcgggagctgcgccggcaggtggaccagctaaccaacgacaaagcccgcgtcgaggtggagcgcgacaacctggccgaggacatcatgcgcctccgggagaaattgcaggaggagatgcttcagagagaggaagccgaaaacaccctgcaatctttcagacaggatgttgacaatgcgtctctggcacgtcttgaccttgaacgcaaagtggaatctttgcaagaagagattgcctttttgaagaaactccacgaagaggaaatccaggaagctgcaggctcagattcaggaacagcattgtc

SEQ ID NO: 407 - DNA, 515 bp, Homo sapiens
tggactcctacctccctgtcatcctggacatcattaaaggagaaatgagccgtcctggggaggtgtgctctgctctcaacctctgcgagtctctccagaagcacctagcagagctgaatcaccagaagcagctggagtccaataagatcccagagctggacatgactgaggtggtggcccccttcatggccaacatccctctcctcctctaccctcaggacggcccccgcagcaagccccagccaaaggataatggggacgtttgccaggactgcattcagatggtgactgacatccagactgctgtacggaccaactccacctttgtccaggccttggtggaacatgtcaaggaggagtgtgaccgcctgggccctggcatggccgacatatgcaagaactatatcagccagtattctgaaattgctatccagatgatgatgcacatgcaacccaaggagatctgtgcgctgggttgggttctgtgatgaggtgaaagacatgcccatgcagac

SEQ ID NO: 408 - DNA, 516 bp, Homo sapiens
  misc_feature 485: n = A,T,C or G
agaagcacgaggtcccagcaaagtctgatgtttactgtgaggtgtgtgaattcctggtgaaggaggtgaccaagctgattgacaacaacaagactgagaaagaaatactcgacgcttttgacaaaatgtgctcgaagctgccgaagtccctgtcggaagagtgccaggaggtggtggacacgtacggcagctccatcctgtccatcctgctggaggaggtcagccctgagctggtgtgcagcatgctgcacctctgctctggcacgcggctgcctgcactgaccgttcacgtgactcagccaaaggacggtggcttctgcgaagtgtgcaagaagctggtgggttatttggatcgcaacctggagaaaaacagcaccaagcaggagatcctggctgctcttgagaaaggctgcagcttcctgccagacccttaccagaagcagtgtgatcagtttgtggcagagtacgagcccgtgctgatcganatcctggtggaggtgatggatccttccttcc

SEQ ID NO: 409 - DNA, 514 bp, Homo sapiens
actcggtggacttctcgctggccgacgccatcaacaccgagttcaagaacacccgcaccaacgagaaggtggagctgcaggagctgaatgaccgcttcgccaactacatcgacaaggtgcgcttcctggagcagcagaataagatcctgctggccgagctcgagcagctcaagggccaaggcaagtcgcgcctgggggacctctacgaggaggagatgcgggagctgcgccggcaggtggaccagctaaccaacgacaaagcccgcgtcgaggtggagcgcgacaacctggccgaggacatcatgcgcctccgggagaaattgcaggaggagatgcttcagagagaggaagccgaaaacaccctgcaatctttcagacaggatgttgacaatgcgtctctggcacgtcttgaccttgaacgcaaagtggaatctttgcaagaagagattgcctttttgaagaaactccacgaagaggaaatccaggagctgcaggctcagattcaggaacagca

SEQ ID NO: 410 - DNA, 123 bp, Homo sapiens
gtctgcagtggactgcagttgccaccttcctctatgcggaggtctttgttgtgttgcttctctgcattcccttcatttctcctaaaagatggcagaagattttcaagtcccggctggtggagt

SEQ ID NO: 411 - DNA, 515 bp, Homo sapiens
gacaatgtgggctccaagcagatgcagcagatccgcatgtcccttcgcgggaaggctgtggtgctgatgggcaagaacaccatgatgcgcaaggccatccgagggcacctggaaaacaacccagctctggagaaactgctgcctcatatccgggggaatgtgggctttgtgttcaccaaggaggacctcactgagatcagggacatgttgctggccaataaggtgccagctgctgcccgtgctggtgccattgccccatgtgaagtcactgtgccagcccagaacactggtctcgggcccgagaagacctcctttttccaggctttaggtatcaccactaaaatctccaggggcaccattgaaatcctgagtgatgtgcagctgatcaagactggagacaaagtgggagccagccgaagccacgctgctgaacatgctcaacatctcccccttctcctttgggctggtcatccagcaggtgttcgacaatggcagcatctacaaccctgaagtgc

SEQ ID NO: 412 - DNA, 154 bp, Homo sapiens
  misc_feature 8, 9, 125: n = A,T,C or G
gctcaatnnattccttagatgcaggcttgctgttgccatctggagatcctttcagtaaatcggacaatgacatgtttaaagatggactcaggagagcacagtctacagacagcttgggaacctcnggctcattgcaatccaaagctttaggcta

SEQ ID NO: 413 - DNA, 433 bp, Homo sapiens
  misc_feature 346, 414: n = A,T,C or G
ttcagatggtgactgacatccagactgctgtacggaccaactccacctttgtccaggccttggtggaacatgtcaaggaggagtgtgaccgcctgggccctggcatggccgacatatgcaagaactatatcagccagtattctgaaattgctatccagatgatgatgcacatgcaacccaaggagatctgtgcgctggttgggttctgtgatgaggtgaaagagatgcccatgcagactctggtccccgccaaagtggcctccaagaatgtcatccctgccctggaactggtggagcccattaagaagcacgaggtcccagcaaagtctgatgtttactgtgaggngtgtgaattcctggtgaaggaggtgaccaagctgattgacaacaacaagactgagaaagaaatactcnacgcttttgacaaaatgtg

SEQ ID NO: 414 - DNA, 424 bp, Homo sapiens
ggctgtatgagctctcagcaagcaactttgagctgcacgttgcacaaggcgaccactttatcaagttcttcgctccgtggtgtggtcactgcaaagccctggctccaacctgggagcagctggctctgggccttgaacattccgaaactgtcaagattggcaaggttgattgtacacagcactatgaactctgctccggaaaccaggttcgtggctatcccactcttctctggttccgagatgggaaaaaggtggatcagtacaagggaaagcgggatttggagtcactgagggagtacgtggagtcgcagctgcagcgcacagagactggagcgacggagaccgtcacgccctcagaggccccggtgctggcagctgaccccgaggctgacaagggcactgtgttggcactcactgaaaataa

SEQ ID NO: 415 - DNA, 466 bp, Homo sapiens
  misc_feature 158, 389, 435, 440: n = A,T,C or G
gaaggatctggttctgctgccggagaaggcaaacccgctttgagtgaagaggaaagacaggaacaaactaagaggatgttggagctggtggcccagaagcagcgggagcgtgaagaaagagaggaacgggaggcattggaacgggaacggcagcgcangagacaagggcaagagttgtcagcagcacgacagcggctacaggaagatgagatgcgccgggctgctgaggagaggcggagggaaaaggccgaggagttagcagccagacaaagagttagagaaaagatcgagagggacaaagcagagagagccaagaagtatggtggcagtgtgggctctcagccacccccagtggcaccagagccaggtcctgttccctcttctcccanccaggagcctcccaccaagcgggagtatgaccagtgtcgcatacangtcangctgccagatgggacctcactgaccc

SEQ ID NO: 416 - DNA, 514 bp, Homo sapiens
agcacttccacatgaagcttttccgtgcccagaggaatctctacattgctggcttttccttgctgctgtccttcctgcttagacgcctggtgactctcatttcgcagcaggccacgctgctggcctccaatgaagcctttaaaaagcaggcggagagtgctagtgaggcggccaagaagtacatggaggagaatgaccagctcaagaagggagctgctgttgacggaggcaagttggatgtcgggaatgctgaggtgaagttggaggaagagaacaggagcctgaaggctgacctgcagaagctaaaggacgagctggccagcactaagcaaaaactagagaaagctgaaaaccaggttctggccatgcggaagcagtctgagggcctcaccaaggagtacgaccgcttgctggaggagcacgcaaagctgcaggctgcagtagatggtcccatggacaagaaggaagagtaagggcctccttcctcccctgcctgcagctggcttccacctgc

SEQ ID NO: 417 - DNA, 134 bp, Homo sapiens
ccccggtgagcggcgtgcgcagggaaggcgctcggggcggcggccgtggccgggggcggtggaagcaggcgggccggggcggcggcgtctgtggccgtggccggggccggggccgtggccggggacggggacgg

SEQ ID NO: 418 - DNA, 251 bp, Homo sapiens
  misc_feature 232: n = A,T,C or G
ggcgctggggcgcccgggcccaggaggcggcggcggcggcggcggcggacgggccccccgcggcagacggcgaggacggacaggacccgcacagcaagcacctgtacacggccgacatgttcacgcacgggatccagagcgccgcgcacttcgtcatgttcttcgcgccctggtgtggacactgccagcggctgcagccgacttggaatgacctgggagacaaatacaacancatggaagatgccaaagtc

SEQ ID NO: 419 - DNA, 165 bp, Homo sapiens
cttggggcttaagaaatatgaaaaacttccagatggcttctatcacatcccccagtcttgttgtggagtgtggaggagaaagggtggaatcggtggtgatcaaaaaccttaagaagacacccaactttccaagttctgttctcttcatgaaaagtggttttgccc

SEQ ID NO: 420 - DNA, 328 bp, Homo sapiens
gtaaatttgtggccaaagaaaatgaagtacagagtctgcatagtaagcttacagataccttggtatcaaaacaacagttggagcaaagactaatgcagttaatggaatcagagcagaaaagggtgaacaaagaagagtctctacaaatgcaggttcaggatattttggagcagaatgaggctttgaaagctcaaattcagcagttccattcccagatagcagcccagacctccgcttcagttctagcagaagaattacataaagtgattgcagaaaaggataagcagataaaacagactgaagattctttagcaagtgaacgtgatcg

SEQ ID NO: 421 - DNA, 153 bp, Homo sapiens
cggccaagaagtacatggaggagaatgaccagctcaagaagggagctgctgttgacggaggcaagttggatgtcgggaatgctgaggtgaagttggaggaagagaacaggagcctgaaggctgacctgcagaagctaaaggacgagctggccc

SEQ ID NO: 422 - DNA, 145 bp, Homo sapiens
  misc_feature 123: n = A,T,C or G
gcagcccagacctccgcttcagttctagcagaagaattacataaagtgattgcagaaaaggataagcagataaaacagactgaagattctttagcaagtgaacgtgatcgtttaacaagtaangaagaggaacttaaggatatac

SEQ ID NO: 423 - DNA, 317 bp, Homo sapiens
attcagcagttccattcccagatagcagcccagatttccgcttcagttctagcagaagaattacataaagtgattgcagaaaaggataagcagataaaacagactgaagattctttagcaagtgaacgtgatcgtttaacaagtaaagaagaggaacttaaggatatacagaatatgaatttcttattaaaagctgaagtgcagaaattacaggccctggcaaatgagcaggctgctgctgcacatgaattggagaagatgcaacaaagtgtttatgttaaagatgataaaataagattgctggaagagcaactaca

SEQ ID NO: 424 - DNA, 70 bp, Homo sapiens
  misc_feature 41, 67: n = A,T,C or G
gggccatggagcacttccacatgaagcttttccgtgcccanaggaatctctacattgctggcttttnctt

SEQ ID NO: 425 - DNA, 378 bp, Homo sapiens
caaagaattcggcacgagtgcagactctggtccccgccaaagtggcctccaagaatgtcatccctgccctggaactggtggagcccattaagaagcacgaggtcccagcaaagtctgatgtttactgtgaggtgtgtgaattcctggtgaaggaggtgaccaagctgattgacaacaacaagactgagaaagaaatactcgacgcttttgacaaaatgtgctcgaagctgccgaagtccctgtcggaagagtgccaggaggtggtggacacgtacggcagctccatcctgtccatcctgctggaggaggtcagccctgagctggtgtgcagcatgctgcacctctgctctggcacgcggctgcctgcactgaccgttc

SEQ ID NO: 426 - DNA, 146 bp, Homo sapiens
  misc_feature 31, 33, 119, 142: n = A,T,C or G
aattacagaagaacaaacagagactgcgaancnatcctctcaatcaaaataagggtaaaccagacttgaatacaacattgccaattagacaaacagcatcaattttcaaacaaccggtnaccaaagtcacaaatcatcctantaat

SEQ ID NO: 427 - DNA, 349 bp, Homo sapiens
  misc_feature 31: n = A,T,C or G
agcagatggaggcagagatagctcacttgangcaggaaaatggtatactgagagatgcagtcagcaacactacaaatcaactggaaagcaagcagtctgcagaactaaataaactacgccaggattatgctaggttggtgaatgagctgactgagaaaacaggaaagctacagcaagaggaagtccaaaagaagaatgctgagcaagcagctactcagttgaaggttcaactacaagaagctgagagaaggtgggaagaagttcagagctacatcaggaagagaacagcggaacatgaggcagcacagcaagatttacagagtaaatttgtggccaaagaaaatgaagt

SEQ ID NO: 428 - DNA, 340 bp, Homo sapiens
  misc_feature 34: n = A,T,C or G
gaggctgactcaagtcctgtggtagataagaganaggttattgatttgcttaaacctgaccaagtagaagggatccagaaatctgggactaaaaaactgaagaccgaaactgacaaagaaaatgctgaagtgaagtttaaagattttcttctgtccttgaagactatgatgttttctgaagatgaggctctttgtgttgtagacttgctaaaggagaagtctggtgtaatacaagatgctttaaagaagtcaagtaagggagaattgactacgcttatacatcagcttcaagaaaaggacaagttactcgctgctgtgaaggaagatgctgcttgctaca

SEQ ID NO: 429 - DNA, 249 bp, Homo sapiens
  misc_feature 31: n = A,T,C or G
gaaggctggcatcattcaggacacctggcanttggccactcagaagggtgaccctgtggcgattctgaaacgccagctggaagagaaggaaaaactgctggccacagaacaggaagatgcggctgtcgccaagagcaaactgagggagctcaacaaggagatggcagcagaaaaggccaaagcagcagccggggaggccaaagtgaaaaagcagctggtggcccgggagcaggagatcacggctgtgca

SEQ ID NO: 430 - DNA, 151 bp, Homo sapiens
  misc_feature 33, 70: n = A,T,C or G
gagccaagatcgcggcacgcatgctctggcgcnttctcaacggccacagcctgacccgccgggagcgcangcagtttctccggatctgcgctgacctcttccgcctggtgccgttccttgtgttcgtggtggtgccgttcatggagtttct

SEQ ID NO: 431 - DNA, 32 bp, Homo sapiens
gaggcaaatgcgaggagctgagtggcctccac

SEQ ID NO: 432 - DNA, 434 bp, Homo sapiens
  misc_feature 15, 16, 50: n = A,T,C or G
tccaaagaattcggnncgaggcaagaactatatcagccagtattctgaanttgctatccagatgatgatgcacatgcaacccaaggagatctgtgcgctggttgggttctgtgatgaggtgaaagagatgcccatgcagactctggtccccgccaaagtggcctccaagaatgtcatccctgccctggaactggtggagcccattaagaagcacgaggtcccagcaaagtctgatgtttactgtgaggtgtgtgaattcctggtgaaggaggtgaccaagctgattgacaacaacaagactgagaaagaaatactcgacgcttttgacaaaatgtgctcgaagctgccgaagtccctgtcggaagagtgccaggaggtggtggacacgtacggcagctccatcctgtccatcctgctggaggaggtcagccctg

SEQ ID NO: 433 - DNA, 318 bp, Homo sapiens
  misc_feature 30: n = A,T,C or G
gaagagcctcaagtcccgcctgaggaggcnggatttgcccggccccgcgtcgtctggcgccgccgccgccagcgcgcatgcagcagattggaataaatatgatgaccgattgatgaaagcagcagaaaggggggatgtagaaaaagtgacgtcaatccttgctaaaaagggggtcaatccaggcaaactagatgtggaaggcagatctgtcttccatgttgtgacctcaaaggggaatcttgagtgtttgaatgccatccttatacatggagttgatattacaaccagtgacactgcagggagaaatgctcttcacct

SEQ ID NO: 434 - DNA, 465 bp, Homo sapiens
tccaaagaattcggcacgagagaacaatcccggggccatggagcacttccacatgaagcttttccgtgcccagaggaatctctacattgctggcttttccttgctgctgtccttcctgcttagacgcctggtgactctcatttcgcagcaggccacgctgctggcctccaatgaagcctttaaaaagcaggcggagagtgctagtgaggcggccaagaagtacatggaggagaatgaccagctcaagaagggagctgctgttgacggaggcaagttggatgtcgggaatgctgaggtgaagttggaggaagagaacaggagcctgaaggctgacctgcagaagctaaaggacgagctggccagcactaagcaaaaactagagaaagctgaaaaccaggttctggccatgcggaagcagtctgagggcctcaccaaggagtacgaccgcttgctggaggagcacgc

SEQ ID NO: 435 - DNA, 79 bp, Homo sapiens
cctgccctggaactggtggagcccattaagaagcacgaggtcccagcaaagtctgatgtttactgtgaggtgtgtgaat

SEQ ID NO: 436 - DNA, 469 bp, Homo sapiens
  misc_feature 17: n = A,T,C or G
atccaaagaattcggcncgagaggaggcaaaaactgagccttttacacaaggtaaggtggtggggcagaccaccccagaaagctttgaaaaagctcctcaagtcacagagagcatagagtccagtgagcttgtaaccacttgtcaagccgaaaccttagctggggtaaaatcacaggagatggtgatggaacaggctatcccccctgactcggtggaaacccctacagacagtgagactgatggaagcacccccgtagccgactttgacgcaccaggcacaacccagaaagacgagattgtggaaatccatgaggagaatgaggtcgcatctggtacccagtcagggggcacagaagcagaggcagttcctgcacagaaagagaggcctccagcaccttccagttttgtgttccaggaagaaactaaagaacaatcaaagatggaagacactctagagcatacagataa

SEQ ID NO: 437 - DNA, 76 bp, Homo sapiens
  misc_feature 49, 56, 74: n = A,T,C or G
actctggtccccgccaaagtggcctccaagaatgtcatccctgccctgnaactggnggagcccattaagaagcncg

SEQ ID NO: 438 - DNA, 184 bp, Homo sapiens
  misc_feature 34, 35: n = A,T,C or G
gaggaaggctggcatcattcaggacacctggcannaggccactcagaagggtgaccctgtggcgattctgaaacgccagctggaagagaaggaaaaactgctggccacagaacaggaagatgcggctgtcgccaagagcaaactgagggagctcaacaaggagatggcagcagaaaaggccaaa

SEQ ID NO: 439 - DNA, 464 bp, Homo sapiens
  misc_feature 22, 58: n = A,T,C or G
ccaaagaattcggcacgagctnaaaatgaaattttaaagaaagagttagaagcaatgngaactttctgtgagtcagcaaaacaagaccgactgaagctccaaaatgaactggcacacaaagtggcagaatgcaaagctttagcattagaatgtgaaagggtcaaggaggattcagatgaacagataaagcaattagaagatgcattaaaagatgtgcagaagaggatgtatgagtcagaaggtaaagttaaacaaatgcagacccattttcttgcccttaaagaacacttaacaagtgaagcagcctcagggaatcacagactaaccgaggaactgaaggatcagttgaaagacttgaaagtaaaatatgaaggtgcttcagcagaagtggggaaattaagaaaccaaatcaaacaaaatgagatgatagtagaagagtttaagagggatgaaggcaagctgat

SEQ ID NO: 440 - DNA, 318 bp, Homo sapiens
  misc_feature 21: n = A,T,C or G
caaagaattcggcacgaggancaactggaaagaagaaatgcagagatttgctccaggtctttcctgtgtaacatatgcaggcgacaaggaggaaagagcctgccttcagcaagacctgaaacaggagtcacgttttcatgtgctactgactacctatgagatttgcttgaaagatgcatcatttctaaaatcattcccttggagtgttcttgttgtggatgaagctcacaggttgaaaaaccaaagctccctgctgcataagaccttgtcagagttctcagtagtcttcagtctcctgttgaccggaactcccatcca

SEQ ID NO: 441 - DNA, 114 bp, Homo sapiens
acgcctggtgactctcatttcgcagcaggccacgctgctggcctccaatgaagcctttaaaaagcaggcggagagtgctagtgaggcggccaagaagtacatggaggagaatga

SEQ ID NO: 442 - DNA, 331 bp, Homo sapiens
  misc_feature 22, 58: n = A,T,C or G
caaagaattcggcacgagcatnggaagattccaacagaaacagatagaaaatgtcttnagaagatatatcaaggaatatgtcacttgtcacacatgccgatcaccggacacaatcctgcagaaggacacacgactctatttcctacagtgcgaaacttgtcattctagatgttctgttgccagtatcaaaaccggcttccaggctgtcacgggcaagcgagcacagctccgtgccaaagctaactaatttgctaatcactgattttgcaaagcttgttgtggagatgtggctggacaggtttgccatcagagtggatataccgttgtatta

SEQ ID NO: 443 - DNA, 448 bp, Homo sapiens
  misc_feature 21, 23, 58: n = A,T,C or G
ccaaagaattcggcacgagtntngacatgcattgtgcctacaaaaacttctacagttnaattgtcccactgagcatgcagacctgcagggaagaactgcacttcacgatgccgcaatggcagattgtccttctagcatacagctgctttgtgaccatggggcctctgtgaatgccaaagatgtagacgggcggacaccacttgttctggctactcagatgagtaggccaacaatatgtcaactgctgatagatagaggagcggatgttaattccagagacaaacaaaacagaactgccctcatgctaggttgcgaatatggttgcagagatgcagtagaagtcttaattaaaaatggtgctgatataagcttgctggatgcgcttggccatgatagttcttactatgcaagaattggtgacaatctggacattctaaccttgttgaag

SEQ ID NO: 444 - DNA, 314 bp, Homo sapiens
  misc_feature 35, 36: n = A,T,C or G
acgtttgccaggactgcattcagatggtgactganntccagactgctgtacggaccaactccacctttgtccaggccttggtggaacatgtcaaggaggagtgtgaccgcctgggccctggcatggccgacatatgcaagaactatatcagccagtattctgaaattgctatccagatgatgatgcacatgcaacccaaggagatctgtgcgctggttgggttctgtgatgaggtgaaagagatgcccatgcagactctggtccccgccaaagtggcctccaagaatgtcatccctgccctggaactggtggag

SEQ ID NO: 445 - DNA, 193 bp, Homo sapiens
  misc_feature 161: n = A,T,C or G
atcccaaaaaacctgatggaccagtacagcgaggctaatgccatcagcaccgcctgctccaacggagttccagagtgtgaggagatggtctctggccttttcaagcagtggatggagaaccccaataataacccgatccaccccaacctgcggtccaccgnctactgcaacgctatcgccagggcggggagga

SEQ ID NO: 446 - DNA, 171 bp, Homo sapiens
  misc_feature 25, 158: n = A,T,C or G
tcctctaccctcaggacggcccccncaccaagccccagccaaaggataatggggacgtttgccaggactgcattcagatggtgactgacatccagactgctgtacggaccaactccacctttgtccaggccttggtggaacatgtcaaggaggagtgngaccgcctgggcc

SEQ ID NO: 447 - DNA, 382 bp, Homo sapiens
  misc_feature 23, 58, 378: n = A,T,C or G
ccaaagaattcggcacgagcggnagacggcgaggacggacaggacccgcacagcaagnacctgtacacggccgacatgttcacgcacgggatccagagcgccgcgcacttcgtcatgttcttcgcgccctggtgtggacactgccagcggctgcagccgacttggaatgacctgggagacaaatacaacagcatggaagatgccaaagtctatgtggctaaagtggactgcacggcccactccgacgtgtgctccgcccagggggtgcgaggataccccaccttaaagcttttcaagccaggccaagaagctgtgaagtaccagggtcctcgggacttccagacactggaaaactggatgctgcagacactgaacgangagc

SEQ ID NO: 448 - DNA, 292 bp, Homo sapiens
  misc_feature 27, 288: n = A,T,C or G
caactcaaggagcagttaaataatcanaaagtggaagaagctatacaacagtatgagagagcatgcaaagatctaaatgttaaagagaaaataattgaagacatgcgaatgacactagaagaacaggaacaaactcaggtagaacaggatcaagtgcttgaggctaaattagaggaagttgaaaggctggccacagaattggaaaaatggaaggaaaaatgcaatgatttggaaaccaaaaacaatcaaaggtcaaataaagaacatgagaacaacacagatgtgctnggaa

SEQ ID NO: 449 - DNA, 414 bp, Homo sapiens
  misc_feature 36: n = A,T,C or G
ataagggcccagcttccagcaatagagacagggtancaccttcatctgaagctagtgagcatcacccgcggcatcgtgtttcaagtcaagcggaagatacttccagcagctttgacaacctgtttattgacaggttacagaggatcaccattgcggaccaaggtgaacaacagtcagaagaaaacgcaagtactaagaacttgacaggcctttccagtgggactgagaagaaacctcattacatggaagtgctagaaatgcgagccaaaaacccagtgccccagctgcgtaaatttaaaaccaatgtgttaccttttcgacaaaatgattcatctagtcattgccagaagagtgggtctcctatttcctcagaagagcggcggcgcagggataagcagcatcttgatgacatca

SEQ ID NO: 450 - DNA, 301 bp, Homo sapiens
ccaaagaattcggcacgagggagcacttccacatgaagcttttccgtgcccagaggaatctctacattgctggcttttccttgctgctgtccttcctgcttagacgcctggtgactctcatttcgcagcaggccacgctgctggcctccaatgaagcctttaaaaagcaggcggagagtgctagtgaggcggccaagaagtacatggaggagaatgaccagctcaagaagggagctgctgttgacggaggcaagttggatgtcgggaatgctgaggtgaagttggaggaagagaacaggag

SEQ ID NO: 451 - DNA, 30 bp, Homo sapiens
agagaagcacgaggtcccagcaaagtctga

SEQ ID NO: 452 - DNA, 783 bp, Homo sapiens
atgacccaccaatcacatgcctatcatatagtaaaacccagcccatgacccctaacaggggccctctcagccctcctaatgacctccggcctagccatgtgatttcacttccactccataacgctcctcatactaggcctactaaccaacacactaaccatataccaatgatggcgcgatgtaacacgagaaagcacataccaaggccaccacacaccacctgtccaaaaaggccttcgatacgggataatcctatttattacctcagaagtttttttcttcgcaggatttttctgagccttttaccactccagcctagcccctaccccccaattaggagggcactggcccccaacaggcatcaccccgctaaatcccctagaagtcccactcctaaacacatccgtattactcgcatcaggagtatcaatcacctgagctcaccatagtctaatagaaaacaaccgaaaccaaataattcaagcactgcttattacaattttactgggtctctattttaccctcctacaagcctcagagtacttcgagtctcccttcaccatttccgacggcatctacggctcaacattttttgtagccacaggcttccacggacttcacgtcattattggctcaactttcctcactatctgcttcatccgccaactaatatttcactttacatccaaacatcactttggcttcgaagccgccgcctgatactggcattttgtagatgtggtttgactatttctgtatgtctccatctattgatgagggtct

SEQ ID NO: 453 - protein, 260 aa, Homo sapiens
MTHQSHAYHMVKPSPWPLTGALSALLMTSGLAMWFHFHSMTLLMLGLLTNTLTMYQWWRDVTRESTYQGHHTPPVQKGLRYGMILFITSEVFFFAGFFWAFYHSSLAPTPQLGGHWPPTGITPLNPLEVPLLNTSVLLASGVSITWAHHSLMENNRNQMIQALLITILLGLYFTLLQASEYFESPFTISDGIYGSTFFVATGFHGLHVIIGSTFLTICFIRQLMFHFTSKHHFGFEAAAWYWHFVDVVWLFLYVSIYWWG

SEQ ID NO: 454 - DNA, 1131 bp, Homo sapiens
ccgggagccatgcgaccccagggccccgccgcctccccgcagcggctccgcggcctcctgctgctcctgctgctgcagctgcccgcgccgtcgagcgcctctgagatccccaaggggaagcaaaaggcgcagctccggcagagggaggtggtggacctgtataatggaatgtgcttacaagggccagcaggagtgcctggtcgagacgggagccctggggccaatggcattccgggtacacctgggatcccaggtcgggatggattcaaaggagaaaagggggaatgtctgagggaaagctttgaggagtcctggacacccaactacaagcagtgttcatggagttcattgaattatggcatagatcttgggaaaattgcggagtgtacatttacaaagatgcgttcaaatagtgctctaagagttttgttcagtggctcacttcggctaaaatgcagaaatgcatgctgtcagcgttggtatttcacattcaatggagctgaatgttcaggacctcttcccattgaagctataatttatttggaccaaggaagccctgaaatgaattcaacaattaatattcatcgcacttcttctgtggaaggactttgtgaaggaattggtgctggattagtggatgttgctatctgggttggcacttgttcagattacccaaaaggagatgcttctactggatggaattcagtttctcgcatcattattgaagaactaccaaaataaatgctttaattttcatttgctacctctttttttattatgccttggaatggttcacttaaatgacattttaaataagtttatgtatacatctgaatgaaaagcaaagctaaatatgtttacagaccaaagtgtgatttcacactgtttttaaatctagcattattcattttgcttcaatcaaaagtggtttcaatattttttttagttggttagaatactttcttcatagtcacattctctcaacctataatttggaatattgttgtggtcttttgttttttctcttagtatagcatttttaaaaaaatataaaagctaccaatctttgtacaatttgtaaatgttaagaattttttttatatctgttaaataaaaattatttccaacaac

SEQ ID NO: 455 - DNA, 1337 bp, Homo sapiens
ggaaaatagataaagtgaaagaagaataaatacatatttttaataatgtaattttaaaaatcctttataatcaggactgagtcttggtttgcagaagctgtcacttaccctgaaacacagtatcaaaagggaaacttaaaacatactgtttgatttttttatttcctcttacaatccatgttttcaggtagaattatgactttccccccattgttacacatttctttacaaaggaggcctgtagaaattggacacgatcatgcttgagcatgtgagttagtcaaattatgagtccctgcctattgtccattacacaccgaatgttaatttaagaaccagaggcagaagttctggcttcctgcttgaaacccaattcttatatgaaattttttaaaagcagaaacctagcagcccatctgctttttctcttttgtcggtgtatttggtacccctccaatgctggtctttttgtagaaactcagtagagaaagtctagctaagcagtgttgaaaagcctgcaagatttcagtttacatatcgacagcatatccactgatttctaaatgggctggtcccatcatctgaagattctgtatagaattattaaaaaaaaaatccatctttctttattttcttcacatgcgacaatttcttaagcactttgacattttggtagttccacactattgagagaataatatatttattttgtgacattgcagatgccaaatactgtaaccttctcatgataacaatacttaggttcaagatcactgttcaaaccctgtcatgctttaaaactgatgcgagatgattttgttttttgcataatcaatacttaagggtgcaatcaactgttagtaattgtgcagtaaagtaaagccctgtggtgtatcaactactagttaagagtctcagttgatttctgtaatgtttgacctaataatagcccgtttcgtctctgacccaacagaggaagcacagatcaaatcaccttggagtggtcaccagggggacagggagccccccaccaatgtatcaatgggtgatttatgatgccttctgccctttggcgagtgaatgggtttcccataggggaagttggcctccctccgtgagctttggaaatgttttctaatagacacagggaggccagttctgtttcagagcaattatcttcccaaattctctgttctggtgttggaactgtgtgccctggtttctgttttcctttctactgctgtaattctctgtctcatcatccttctcttttgtttccatagccttttataatgcatatatgatgctgtgaacagaaataaattatttatacaatc

SEQ ID NO: 456 - DNA, 395 bp, Homo sapiens
  misc_feature 237: n = A,T,C or G
tatgtcctgcctgtgctcaatattgatggctacatctacacctggaccaagagccgattttgtagaaagactcgctccacccatactggatctagctgcattggcacagaccccaacagaaattttgatgctggttggtgtgaaattggagcctctcgaaacccctgtgatgaaacttactgtggacctgccgcagagtctgaaaaggagaccaaggccctggctgatttcatccgnaacaaactctcttccatcaaggcatatctgacaatccactcgtacctgcccgggcggccaagggcgaattccagcacactggcggccgttactaggtggatccgagctcggtaccaagcttggcgtaatcatggtcataagctgtttcctgtgtgaaa

SEQ ID NO: 457 - DNA, 597 bp, Homo sapiens
agagaatcaaggaatattccttgaagagttctaagccagattttcatagtaaagaacaaagactggtagggaaaggagaagtcatcctagtcaggtggtggtaaaaaggtgagaagaaacttgggacaagaaggctgaagatggggccgaaaacagcaaaatactaactgtccttagcattttggataaggagcttggattaggtaaataagcaatagaagcgtttacaaggtccttaattttttaaaaaaagttgtaattcatattgtaataaatctaagtgaggaaacagattcagaagctttacattttcccagatgtatggcaaaacaaaagatctgaaatatttgcaacaggattagatagcaacatgtctctccataaatgttttgtgggttgagtttctttaaggagaacttaggaaaataaggcatgatggagagggtgcaattgatgaggtctgatacataaagcaaagtcaattccttcctgagatgcaaaggaacagactccattacctggctttataaaaggtcaagagtaaatttgggtacctgcccgggcggccaagggcgaattccagcacactggcgggcg

SEQ ID NO: 458 - DNA, 561 bp, Homo sapiens
  misc_feature 297, 421, 484, 496, 500: n = A,T,C or G
accaccattcctacagttgacattcattgttacatcccaatgtgtttgaagtattaaaaaaacatggagtcgtcttctcataatgcccttattaagattacaaagattacaaaagaatccacaagtattacggcactgtgtgagacttatttgtcatgatccaagggaagaacaagactgcagttctgtgcaaagttgtggaaatggcctcagttccatgggagatggtattccacaacagacttcactagaaggataattgaaaccttttactttaacactgaaagcataattcantgcattctcaaaattcaagtttcaagatatggagagatgctaacattctgttacataattaactagaaaatacttgaacagaattttaggaaactatataaagaaagggaacataagtttttgntaattcttgctgaaggcaacttgaattcatttcttataacattaaatcttagcagctaaattnttttaaatgtgngganataaagaaaagcacatccattcttgacattttggtgaataaactaacagctttattaatga

SEQ ID NO: 459 - DNA, 789 bp, Homo sapiens
  misc_feature 21, 51, 60, 77, 89, 756: n = A,T,C or G
ggacaagatccctttataccntccaaacgtgcaaaattgactggcatcacnagtgtctanataaatttctgggcccncatcatttgttntcccaggatatctatcagcatagtgacccatctgtgggcagcctccacttggacaagggaaacacttgtttgcagtgaagacgttgtaagaggcacaggggaatcccagcaaagccatcagggttgacgatgcttatcagtgtaatatttgtagcttcttaagtgattacaggccgcaaagtctcgagtcccttcccagattccgtctatgtccacaatctgagagagaatgttctttttacatccaggcatttccactcctccatttggaaagaaatctaggtggcccacgacttggctcattccaaaccccaaattggggactatgggggcaccatccgtgtgaattacatccacaaatttggcatcgctggggtccaatcggactaattcaggtgtgccctgaaagcaaggttctgctgggtccaaccctgtgatgcgtccaatggtcccattggttctccttccagcctcccccgcagcgtgggcacccaggctgtggccaatgacatgcacgttggaaggtgagtaaccgaacgccgactgaagaaattcaacaaaatatgccacttctgctcccacgatcctgatgttctgcgaggcttgtgtgtatccagttcgggagccacctttccagtccacacagatacagttcacactttccacnttgaacagattcttgcacacattggccagccag

SEQ ID NO: 460 - DNA, 371 bp, Homo sapiens
caacatggacggccacatcttcgccagcatcgacatgcctgccatcaacaagggcaacaagaaagtcacggaggaggacttctacaagctggtcagtgagttcacaatcaccaaggggctcagaggcgccaagacgacctttgatgtctacactgagtcctgggcccaggacccatcccaggagaataagaagaagactgtggtggactttgagaccgatgtcctcttcctggtgcccaccgagattgccctagcccagcacagagccaatgccaagagtgccaagacctacgcctacctgttttcccatccctctcggatgcccgtctaccccaaatgggtgggggccgaccatgcagatgacattcagt

SEQ ID NO: 461 - DNA, 166 bp, Homo sapiens
  misc_feature 37, 40, 53, 83: n = A,T,C or G
accctttgacacccttcttgccctcctctatggcccnatncaggcaaccaaanaaaggtagagtgtgggaggccaaggagggnggatcacgagggaattgaaccatctggaacctgggaaaccccgactctactaaaaaacaaaaaattagccggggttggtggca

SEQ ID NO: 462 - DNA, 718 bp, Homo sapiens
  misc_feature 6, 40, 604, 616, 642, 700: n = A,T,C or G
acttcnttgcggacttgacttcttgagcaagaaggctggnttctgttcattaagagaatcacagagatgaatctcacaatgcaggaaaactaggtcataatgtccagcaaacatgaacatctgaactgagaaccggctttccgaggactgcccattctcctccacgtggatggtggaatcacgctgatttgagcagctgtttctgatgatgaaatacttcacaaggtcagccttgtcttcagtgggggtggcatagcagttcctcaacaccaggttaaaccgggaggtgtccccttgttccaagatggcacccacatacagcacggactcaacagacagttcaactgcatccccttcgtaaggattcgtgtagttctggtcttggaagagggccatcctgacaatgaactctccattcccgtccacactgacgttcagggaacttacaatgggctgcaaggcagcttggaggctgactttcatgtccagtgggtagacacattggaagttgatgttgaggatggtgtctctgatgatgaaatcattgaccaaggagagggtgtttttgtagatggcatgggtttgatttctctccagaatgttnctgcaggcactnagcctggacgggggctggcacagatncccagttcctctcctctgcttgcaagatgctgctgcagttttgggtctcgcaaggtanggcaatgaccttccccct

SEQ ID NO: 463 - DNA, 677 bp, Homo sapiens
  misc_feature 409, 432, 460, 577, 599, 605, 616, 618, 621, 625, 636, 657: n = A,T,C or G
ctcaagaacatctccagcttgatttttggaaatcacccaccaccccaggggagacagcccacgtccgagttcccttcgtcaacgtccaggcagtcaaagtgttcttggagtcccagggaattgcctattccatcatgattgaagacgtgcaggtcctgttggacaaagagaatgaagaaatgctttttaataggagaagagagcggagtggtaacttcaattttggggcctaccataccctggaagagatttcccaagaaatggataacctcgtggctgagcaccctggtctagtgagcaaagtgaatattggctcttcttttgagaaccggcctatgaacgtgctcaagttcagcaccggaggagacaagccagctatctggctggatgctgggatccatgctcgagnagtgggttacacaagctacggcnctttgggacagcaaataagattggttcntgattatggaaaggacccatccatcacttccattctggatgccctggatatcttcctcctgccaggtcacaaaccctgatgggatacggttctctcaaaccaaaaatcatgtggggngaagaccccgggtcccaggatntggaanccctctggggntnggnggtnggatccctaanccgggaacctggggatggcanggtttttggaggaccctggg

SEQ ID NO: 464 - DNA, 294 bp, Homo sapiens
  misc_feature 5, 42, 163: n = A,T,C or G
actcntttcaatgaatttgactcagatgtggatgttgggatnttgcagatggttaaatttatttggtataacaatgtgatcaacccaactttacctagagtgggagcatccaagattatagtggagacaaatgttggaaaacagttcaacttctgtagtccanaaaccgtcagggaggaagttctgctcaccctcacaccgtgttaggagactactgttatttgaccaatgaattgacttctaataaaatctagtggtgatgcaaaaaaaaaaaaaaaaaaaaaaaaagcttgt

SEQ ID NO: 465 - DNA, 230 bp, Homo sapiens
  misc_feature 6, 46: n = A,T,C or G
acgaantttctctcttacaaaccactggcagaatgcaggataaatncactctctggcatggaaaccacagtccatgaaaatggcaggcttattttgtccagctttgccaaccttcaggaggtaaatagcgcgtccctcaaatgtggttccgataacactgcgagagatgagggctggattctcagtggcgacttgttgagtccaagcctctatcgtttcccacttgttgt

SEQ ID NO: 466 - DNA, 230 bp, Homo sapiens; identical to SEQ ID NO: 465
  misc_feature 6, 46: n = A,T,C or G

SEQ ID NO: 467 - DNA, 548 bp, Homo sapiens
  misc_feature 5: n = A,T,C or G
acttnaagaaaacattcacatttctgctacaagaaaaggttctgatgatttaaatgtttaagacttatggcagctcttcagaaagaaaaaggaagtcttcataagatacagagatagggaggctgaggcgggtggattgtgaggtcaggagtttaagaccagcctggccaagatggtgaaaccccgtctctactgaaaatacaaaaattagcctggcatggtgacgggcacctgtaatcccagctactcaggctgaggcagagaattgcttgaacccaggtggcggatgttgcaataagccgaaatcgtgcaactacactccagcctgggcaacagagcgagactcaaacaaacaaacaaaaagtaactaggaaaggtgttttacatgtgggcttattttaagaagaaatttactaaaagctgagagatgggtctcgataaaatttgatgattcaaagaaagtggatgggaactttactgatcttagtttaaaatatcctgagtcacctgccttatgaggtggaaggtctttctttcttactatatgt

SEQ ID NO: 468 - DNA, 548 bp, Homo sapiens; identical to SEQ ID NO: 467
  misc_feature 5: n = A,T,C or G

SEQ ID NO: 469 - DNA, 603 bp, Homo sapiens
  misc_feature 8: n = A,T,C or G
acattagnaccataacatgcgtctttaaagccttcccaaatattagtaatcttgaccagcaatgacaagaaaaaagaggagcacctttacaagcagttgatatccaatattaaaataattgtggctttaaaaatatttctttaaattcttgcattacacttttctttttaaaccaatcttccaggagattaatcaatgaaatttataagttttatcaacgtataaaatttttttcatcttctgggactcatagaatacaatctgtgtttctgaccagttgaggtagttaaaatagggagggcttttctaatttcgtatttgactatttcagaaagaaaggttatcttttactggtgagcacagtcattgctctgcagatgggctaggattcaaagaatataacacagtgttgttatcataaagagtgttgaagtttatttattatagcaccattgagacattttgaaattggaattggtaaaaaaataaaacaaaaagcatttgaattgtatttggtggaacagcaaaaaaagagaagtatcatttttctttgtcaaattatactgtttccaaacattttggaaataaataactggaattttg

SEQ ID NO: 470 - DNA, 249 bp, Homo sapiens
acacatttggcccgggagctacaacaatctatcctgctgttgggggctctgacgactgggcttatgaccaaggaatcagatattccttcacctttgaacttcgagatacaggcagatatggctttctccttccagaatcccagatccgggctacctgcgaggagaccttcctggcaatcaagtatgttgccagctacgtcctggaacacctgtacacacgaggacagtaaccaaagtctccttgctggt

SEQ ID NO: 471 - DNA, 152 bp, Homo sapiens
  misc_feature 5, 40: n = A,T,C or G
cgganacaccatgataaggacgctgctgctgtccactttngtggctggagccctcagttgtggggaccccacttacccaccttatgtgactagggtggttggcggtgaagaagcgaggcccaacagctggccctggcaggtctccctgcagt

SEQ ID NO: 472 - DNA, 868 bp, Homo sapiens
  misc_feature 31, 32, 207, 414, 503, 557, 588, 628, 637, 654, 673, 677,678, 680, 688, 694, 698, 699, 702, 704, 705, 707, 716, 733,741, 742, 776, 788, 790, 802, 803, 811, 860, 862: n = A,T,C or G
gcaaacctaccactatggcttgtgatggctnncaaagaaaaactgaagcatagccttaagaaaaatgctgcaagatgtgtctatgaagagcactgcagtgagttgttagggcaaggggcacatggccttacataggctgtcccaggcaatgcccagcctcatcctgtaaggaagtcggaagtctccgctttggagactagttagctnacactcttttcgggtttgttctcttctgggcactcctagtgttaatgttcttcttgggactggctggtttgggagcaggagtctttccctttggtttggggggattactacgactggtgcgcccggctgttttcttcttgtcctgaactgttctccgctgttcctgcagcctctcttcccactgtatggatcttttactaagctganctctccatttttcaactaagcaattttcaagaagcatcatccttgagcgccactcgtaacacatgatgagaacatcttgatgggggcangatgtgtggatactggcaaggaagaatttgtaatgagcgggacttgagttcganggatgggtgatgaaggacttgaagatctctnttacatccaccaccgttgtgacctccattgcaagccactnctctgcacnggcttttaatttttggncatggaataacccttaccntganncnttttttgnttgganaatnncgntnngnccccaaaantttgggctttccacccntttttttnnccccctttggcccccccggaattccggggggggnctttaaaggggncngttttttaaccnnggtgcccnaaccatttttaaaaagaagggggccctttttttcctcttgtagcccctngncccccc

SEQ ID NO: 473 - DNA, 686 bp, Homo sapiens
  misc_feature 39, 41, 170, 462, 464, 525, 527, 530, 532, 629, 634, 648,657: n = A,T,C or G
acaattttatttttctgcttgcccaagaaacaaagcttntntggaaccatggaagaagatgaaaatgagactggcaaagaacaaatgctgaatctgaagaagatttgggcaaataatctgcatacttttaattgggaataagatggaaaatatgaatgctaaatcaaatnttttaaaaaatacaccacacgatacaactcaatacaggagtatttcttctcaaattcttctagcaccatcaacattcttcaagtatctgaaatactattaattagcacctttgtattatgaacaaaacaaaacaaggacctcagttcatctctgtctaggtcagcacctaacaatgtggatcacactcatgggaaagtgttttgaggtagtttaaacctttggaagtttgggttttaaacttccctctgtggaagatattcaaaagccacaagtggtgcaaatgtttatggntnttatttttcaatttttattttggttttcttacaaaggttgacattttccataacaggtgtnanagngntgaaaaaaaaattcaaatttttgggggagccggggggaaggagttaatgaaactgtattgcacaatgctctgatcaatccttctttttctcttttgnccccnaattttaagcaagnagatgtgcnggaagaaatgggaaggattcagctttcag

SEQ ID NO: 474 - DNA, 691 bp, Homo sapiens
  misc_feature 2, 3, 594, 637, 680, 686: n = A,T,C or G
cnnctgggaagcacaacgacattgacgtgttcatgcctaccctcccagtgcccactgtagccatggaggtgcggccatcaccaagcacccccctggaggtccctctcaatgcctccagcaccaatgccacagaggatcacccagaaaccaatgccgtagatgaaccctacaaaatccatggcctggaagatgaagtccagccacccaacctaatccctcgacgaccgagcccctatgaaaagaccagaaaccaaagaatccaagagctcattgatgagatgcggaagaaagagatgctcggaaagttctaataaaatggaaagatagcatccctagcatttttttcttgcttatagagatattccatgggatagcaaatcctgtgtcatggagatgaagtcaaaattcctgattccaaaaggttttgagaaaacaaagagggggaatgacgtaagaaagataggcatgagcatgtggtaactaggttagcacgtgtgcttcccagcccaggagcgaccaaatactgtggtggcgtcaggtgtgcagtggagaggaatatagaggctgtatggcctccctcagtgagggcagggncaagagggatcactctgagagaacaaataataggcccccagtntgctaagcaggggattggggaacctttccttttctttggcggngatgcntggac

SEQ ID NO: 475 - DNA, 796 bp, Homo sapiens
  misc_feature 37, 716, 760, 770: n = A,T,C or G
accgtatcctcagaaagcatttatggaaatacacatnctttagaagagagatgcttcacgcacgactgactttaatggctctttcaggcaacagagaaaccaccacatgcccatgacatgagctcagttgttcagcaggcacccagaggaagcctttaattccgagcaggtttcactgattggtcctggagcaggtgtagttatgacatttactaagtgagtggttaacagctgactgcctagaaaacctaggaaggcctggtccctctgggttactgacagcgtctaccctcacgttgtaaaacagcaccggggaggtgtgacaaggctgtccattttacagccttggacaacagaagagaaccattatgtgctacattcagactttctgatttagttttagtataacctgacattggtaacccgtctccagtattcatcctccaactacaggtatgagtgtttcctttttttttttttaaaggcccattaacttaatttaaatgttcccatccttatgaatttactcactaaggaaaactataagctcagattttacaaacaaaagcaacttacaaggtattattgctggtcctttatcccttctctttaatgcaatctcaaaggttttttggctattagttttcataattttcttatggtgcacacaaaaacaagattcctctctaaaacgtagaggatgggggaaaatgcanatgctgtttttccaactaaaaatgcttacaaaagacagactggntgaacaaacnaaaaaaccccccccgttaagctgggt

SEQ ID NO: 476 - DNA, 326 bp, Homo sapiens
  misc_feature 2, 3, 245, 288: n = A,T,C or G
tnntgcttcctggcctgattgaggagatggaaaatttttgcaaaaaacaaggtgttgtggtcttccatccagtttcttaagtgctgatgataaaagtgaattagacccaccttgacctggcctacagaagtaaaggagtaaaaataaatgcctcaggcgtgctttttgattcatttgataaacaaagcatcttttatgtggaatataccattctgggtcctgaggataagagagatgagggcatnagatcactgacagctgaagatagaagaacatctttggtttgantgtttaaataatatttcaatgcctattctctgcaaggt

SEQ ID NO: 477 - DNA, 801 bp, Homo sapiens
  misc_feature 41, 713, 727, 764, 774: n = A,T,C or G
acatcattattcagtattttggttgttatttcaccaacagntattccaatttatctttgaaaatgcagcctttattcttagttttaaataacaataatcatgtaagtgcaactaacttagaatcccttgctactgggagtaaaaacctaaataacaagttaataacggattcagcctcaaaaggataatcaccgtgtcagactacccgttcctggaatttaaaaagtgatttatgttgtgtagtcaagtttcacagcatgcatatatatatatacacacacacacacacatatatgcttatgtatgtatgtatattatacatacacatttctattcaaatagtaagattccatattcaaaagtttgtatcacaatatatggaaaagaattaagtaggcggtgcaaagcaacttactttctcctaaaaatgtaatgtcattcctatattttaagaaagctatgtaagtattttgcttttatgacactaggtaggaatgctgcaccactgcccagcagctttattaaacaattaaaacaaaatgttaagattgaccattactcttctccatatattgggtaaaaaactaagagggaagaggaaaatcagtaacctttcaaaactgatgatctttatcagcagaactagactgaatttcattacattttagaatgaacagctctcaacaacaaattatcaagatgtttaaaagatncacaattttgaagnctgaataatgatactgcaaaaacaagtcaagattgcngacaaagccntcccaaaaatatcactgggggtttacc

SEQ ID NO: 478 - DNA, 383 bp, Homo sapiens
  misc_feature 12, 14, 190, 257, 260, 279, 284, 332, 350, 383: n = A,T,C or G
gtttaataaggnanctgttaatacattctccatctttcctgtctggcaacaggaaagatattattggtgagatagtgcaaaattgtgagaattggttatgtttgatgatgaataaattcaagatttttgaaggcttcactgctatttgggatgggaaggtgagtttacaaaatgaaaaaggtagattttnatgttacagaaatcagtaacgggtttcttgttgcgttaattgcctttcacttgatttgccatgatgnttnttcctcattattgatctanaagtntgcctcttggatagtaactagtaacttagtatctactttaaaatttgnggcttttctcttcagggncccaggccataaaacaacggagagctgtacctn

SEQ ID NO: 479 - DNA, 410 bp, Homo sapiens
  misc_feature 34, 43, 200, 356, 394: n = A,T,C or G
ttttatgcccaggcccaggactccacctcagacntgatcccanccccacctctgagcaaggtccctctgcagcagaacttccaggacaaccaattccaggggaagtggtatgtggtaggcctggcagggaatgcaattctcagagaagacaaagacccgcaaaagatgtatgccaccatctatgagctgaaagaagacgngagctacaatggcacctccgtcctgtttaggaaaaagaagtgtgactactggatcaggacttttgttccaggttgccagcccggcgagttcacgctgggcaacattaagagttaccctggattaacgagttacctcgtccgagtggtgagcaccanctacaaccagcatgctatggtgttcttcaagaaagttnctcagaacagtggagt

SEQ ID NO: 480 - DNA, 460 bp, Homo sapiens
  misc_feature 4, 317, 451: n = A,T,C or G
aaantcaaaaagacacaaaggaagatagaatgagaaacagacctacaagaatcattaaacaataaaataacagtaatctttgtcttcagaaaataaatattttaaaaatagacttgccaatcaatacacatacattgaatagagggattatataaaattttatataccaagatccaacttgcctctcttcaagagtcacttgagatctagtagtgggatgagcctgaaagtggcaagtggaagaagacattttaggcaaacatcaaccaaatgagagcagaagagatcaaaattgtattatacaaaatacatcgtangtcaacaactctcttattttataaaatatactttatgtcaaaattcacaagagaaaaaaggtcattaaacaataataaagatatcatttattgaaaatgtatgacaaatatgtgcatacatatatttatatgtntgtgtctgt

SEQ ID NO: 481 - DNA, 776 bp, Homo sapiens
  misc_feature 11, 43, 669, 719, 722, 739, 754: n = A,T,C or G
gaggtgcattntggaatggaacaaaaaagaggagcttgtagcntagcaagccatcaagcacttgaagcaatacagccctctacttgctgcctttactactcaaggtcagtctgagctgactctgttactgaagattcaggagtattgctatgacaacattcatttcatgaaagccttccagaaaatagtggtgcttttttataaagctgaagtcctgagcgaggagcccattttgaagtggtataaagatgcacatgttgcaaaggggaagagtgttttccttgagcaaatgaaaaagtttgtagaatggctcaaaaatgctgaagaagaatctgaatctgaagctgaagaaggtgactgaattttgaaactacaccctcagtaaagcaaacaggagttgtagataaaatgtcatgtctcatgtgtcctggttcttacatcttcctacctccctgtatcaagcatgatataagggctttcatggcaaattttattttaactgtttctatggttgctggaaatgttgggtttagtttctaaaaccatgttttaagtagctacaggagctatagatttgaatctaatgttgcattagtcttttcagttatcttctacctcctgtattttctactgtaataatgtaatttaaggccttccacaatgaacagntcactttattccctgggttttctataaacaggttttaaggatattgattnggntaaaaaaataatttggntataaaaattctgtntgcaaattaaacctggaaaaag

SEQ ID NO: 482 - DNA, 342 bp, Homo sapiens
  misc_feature 5, 55, 133, 185, 216, 224, 278, 286, 310, 338: n = A,T,C or G
aactngcagataaagcccctagtcattcaccattaagtatattaccttttggtgnggagtttttcatcttggctcactgcagcctcaacctcttaagctcaagtgatcctcccaccttaactgcctgagtagnggggacaataggcatgcaccaccatgcccagataattttttttttaatattntgtaaagatggggattccctatattgtccanaatggcgntgaactcctggctttatgcagtctttccacctcagcctcccaaaggtctgggtnacaggtgngacccactgcgccgggccaatacnggtttttcatggaggacttttaccacgnctca

SEQ ID NO: 483 - DNA, 71 bp, Homo sapiens
  misc_feature 5, 10, 64, 68: n = A,T,C or G
ttganggcgnttgtccataggctgcgcccccctgcgagcatcacaaaaatgggacgctcaaggncaanagg

SEQ ID NO: 484 - DNA, 503 bp, Homo sapiens
  misc_feature 33, 34: n = A,T,C or G
taaacatctcgtgttgggctagaccagtcgctnntttatcacttcaagagatacttattgtgtgcctattctgtgccagacactggattagacagtggagaacaagacacataagacagctacaaaacccctgttctagtggaggaaggcagacagtaaagaagcagaacaatagagaatgtaagagccaagtcacaatgaatgctattattattaagtaaaatcaagataagggggaggaaggacaaagctcctctacagaagaatgccaaataatttatggagatatgcgaagacgtttcagaacctaatgtcccattctctaagtgtggcctgtgtttactgactttcttccacagagtatggtatggaaggaggaggaaaagtgacttcacagtggcgaaagctgatgaacattagcttggccaagtattggagattaacatcaacagttataagtcatattgatagtatgtgccctgataggatgtgatgagaagggt

SEQ ID NO: 485 - DNA, 207 bp, Homo sapiens
  misc_feature 4, 12, 112, 143, 187, 207: n = A,T,C or G
aaanggggattnctctatttttgtatttgtttgaaatttctagtgtcacaaaaattataaaaaccaactaaatataaaaaaagataatgaaggcctaaatgagattgctcantttccgacatttatcttacagaatgaaatanagagattatatcatcagctcattaagagtaagaggtcgttacancagtctttgaatgaaatcan

SEQ ID NO: 486 - DNA, 235 bp, Homo sapiens
  misc_feature 37, 43, 51, 67, 73, 80, 81, 85, 97, 144, 155, 179, 182, 191,235: n = A,T,C or G
acctgtttaagttacttcaaccctgaaagtagggacnggtttntcattccnatattctggatggganttcaangatggtnnatgnaaaactggaagnggagatatcgagaactacaatgatgctactcaggtcacgagattgtngtctgactggncttcttgatcttgcactggacaangantacgtgcgntctaagattgccgaatatatgaaccatctcgttgacattggtgn

SEQ ID NO: 487 - DNA, 494 bp, Homo sapiens
  misc_feature 3, 36, 93, 192, 248, 276, 278, 338, 356, 379, 392, 401, 410,411, 412, 463, 464: n = A,T,C or G
ggncataaacagctcctttggcttccctagaactgngaagcatatcgatgctgctctttctgaggaaaacactggaaaaacctacttctttgntgctaacaaatactggaggtatgatggatataaacgatctatggatccaggttatcccaaaatgatagcacatgactttcctggaattggccacaaagntgatgcagttttcatgaaagatggatttttctatttctttcatggaacaagacaanacaaatgtgatcctaaaacgaagagaantntgactctccagaaagctaatagctggttcaactgcaggaaaaattgaacattactaattngaatggaaaacacatggngtgagtccaaagaaggtgggttncctgaagaactgnctattttcncaggtcatnnntaacctctagagtcactgatacacaggaatataatcttatttatacctcannttgcatatttttccactatttagaatgtag

SEQ ID NO: 488 - DNA, 271 bp, Homo sapiens
  misc_feature 34: n = A,T,C or G
atgaaactccttgtgctagctgtgctgctcacantggccgccgccgacagcggcatcagccctcgggccgtgtggcagttccgcaaaatgatcaagtgcgtgatcccggggagtgaccccttcttggaatacaacaactacggctgctactgtggcttggggggctcaggcacccccgtggatgaactggacaagtgctgccagacacatgacaactgctatgaccaggccaagaagctggacagctgtaaatttctgctggacaacccgt

SEQ ID NO: 489 - DNA, 305 bp, Homo sapiens
  misc_feature 24, 28, 51, 84, 128, 149, 164, 186, 197, 236, 246, 249, 251,298: n = A,T,C or G
ttgtggcaacagggtgcagaacanacanttcatttactgccttcacagatnagaaattcaaaagtaacttaagactactatgtnggcttaaaattatcaggataaacaaatacttctaacaggatagnaaaaacaagtaaaatgttatntctcataaactaatncctcaaaagatgtcctacattnagcaactgttntctaggacatgtttactagaactactttaagtatgctgngctttctttncangngaggtatctatattgaggaaaaaaatcttataaattcctttgacatnaaactaa

SEQ ID NO: 490 - DNA, 81 bp, Homo sapiens
  misc_feature 9, 13, 66, 71: n = A,T,C or G
gctacgaangacncacgctgcttcactgacgactccccatggccaggaatcacggaaagacccctncatanattgccttgg

SEQ ID NO: 491 - DNA, 441 bp, Homo sapiens
  misc_feature 6, 8, 100, 195, 212, 236, 254, 275, 277, 308, 341, 342, 348,349, 354, 361, 374, 383, 389, 434, 438: n = A,T,C or G
aatgcnanatatccatatgatagaatattatttggcaataaaaaggaatgagatgctgattcatgccgcagctgggatgcaccttgaaaatatactcagngaaaaagaccacatgtatgattccatttatatgaaatgtctagcatgggcaaatctatagagatggagagtagattagtggttacctagagttgngagaaaacagagtgaanactaacgggcatagggtttctttngggggtgagaaaaatganagttgcacaactctgaatatngnaaacactactgaattggatactgtatagggngaatggtgtggcatgtgaattatatctccatannagcagnnattanaaaaaantggaagagaatcncagataganaccacnggagagagccactgggtgcaaaagcctgtcgaggcaaacctgcanaccngca

SEQ ID NO: 492 - DNA, 76 bp, Homo sapiens
  misc_feature 32, 40: n = A,T,C or G
ttaagcaacctgagaaatgtggtggaggctcngtttgatngccgggttcgtgcaacaggacacagttatgagaagt

SEQ ID NO: 493 - DNA, 127 bp, Homo sapiens
  misc_feature 5, 40, 59, 122, 125: n = A,T,C or G
ccggnaaaaggccgcgttgctggcgtttttccataggctncgcccccctgacgagcatnacaaaaatcgacgctcaactcatgaggtggcagaaacccgacaggactataaaagataccaancgntg

SEQ ID NO: 494 - DNA, 800 bp, Homo sapiens
  misc_feature 674, 692, 741, 791, 794: n = A,T,C or G
actatctggtttgagagtgcccttgaaaatttcatactgcttagagtttcctttatttccgaacaaagaaactagtatgtgtcctgtaaccttttttccagacagtgtgacagataccttatacctccaacgtgcaaaattactggcatcaccagtgtctagataaaatttctggcccacatcatttgttttcccaggatatctatcagcatagtgacccatctgtgggcagcctccacttggacaagggaaacacttgtttgcagtgaagacgttgtaagaggcacaggggaatccagcaaagccatcagggttgacgatgctatcagtgtaatatttgtagcttcttaagtgattacaggccgcaaagtctcgagtcccttcccagattccgtctatgtccacaatctgagagagaatgttctttttacatccaggcatttccactcctccatttggaaagaaatctaggtggcccacgacttggctcattccaaaccccaaattggggactatgggggcaccatccgtgtgaattacatccacaaatttggcatcgctggggtccaatcggactaattcaggtgtgccctgaaagcaaggttctgctgggtccaaccctgtgatgccgtccaatggtcccattggttctccttccacctccccagcagcgngggcacccaggctgtggncaatgacatgcccgttggaaggggagtaccgaacgccgactgaagaaantcaacaaaatatgccacttttggtccacgaacctgatgttttgcgaggcntgngggtat

SEQ ID NO: 495 - DNA, 629 bp, Homo sapiens
  misc_feature 19, 20, 23, 54, 59, 60, 471, 560, 565, 567, 570, 577, 593,624: n = A,T,C or G
ggggcagtaagcgtccagnnttntggatcgacacgggcatccattcccgggagnggttnncccaggccagtggggtctggtttgcaaagaagatcactcaagactacgggcaggatgcagctttcaccgccattctcgacaccttggacatcttcctggagatcgtcaccaaccctgatggctttgccttcacgcacagcacgaatcgcatgtggcgcaagactcggtcccacacagcaggctccctctgtattggcgtggaccccaacaggaactgggacgctggctttgggttgtccggagccagcagtaacccctgctcggagacttaccacggcaagtttgccaattccgaagtggaggtcaagtccattgtagactttgtgaaggaccatgggaacatcaaggccttcatctccatccacagctactcccagctcctcatgtatccctatggctacaaaacagagncagtccctgaccaggatgagctggatcaagctttccaaggctgctgtgacagccctggcctctctctacgggaccaaggctcaactatnggcancntcntcaaggnaatttatcaagccacnggaagcactattgactggacctacagccagngcatc

SEQ ID NO: 496 - DNA, 331 bp, Homo sapiens
  misc_feature 19: n = A,T,C or G
acgagtggattgtcagatntgccttgatggaagagagtttgttgcggatgaaatcagccagggccttggtctccttttcagactctgcggcaggtccacagtaagtttcatcacaggggtttcgagaggctccaatttcacaccaaccagcatcaaaatttctgttggggtctgtgccaatgcagctagatccagtatgggtggagcgagtctttctccaaaatcggctcttggtccaggtgtagatgtagccatcaatattgagcacaggcaggacataaaagtctaacttgttgagaagctctgtcacttggatctcacgtccataggt

SEQ ID NO: 497 - DNA, 213 bp, Homo sapiens
  misc_feature 156: n = A,T,C or G
acaggtgttccaggacgtagctggcaacatacttgattgccaggaaggtctcctcgcaggtagcccggatctgggattctggaaggagaaagccatatctgcctgtatctcgaagttcaaaggtgaaggaatatctgattccttggtcataagccnagtcgtcagagcccccagcagcaggatagattgttgaagctcccgggccatatgtgt

SEQ ID NO: 498 - DNA, 710 bp, Homo sapiens
  misc_feature 19, 522, 606, 676, 703: n = A,T,C or G
actgaagatcagcgatgcnaactcattagggaggagatggtctgaactgagttggagacatagtctagtttaatttttgacttcatagtaattgcaggaccagttctagacatccatttttcagcttcctctagtttttgaacttgcaaacaaaggagaacttcttctcacaagattcatccttccatttcttgaatcctgagcatgaagtcaggcttgcacagtagccagcattagcactgctcggggatccagtgtcccaggacttgtaggagaccagggacccactactccagtgccagcggcggttcttttttgggtcatggaggccaatccagacattgctgtcatcagtgctactctccttaatcagtgaggccacgaaggcaccctccgcctgggtgagcacagacaccaggttgcctgaattcatgttctggcaatagagatctgcatcaacccaggtctcagggtcttcattaaagtagtagcagtaggagcgataggcattggtgccttctnggcagctgattcggggattaggcagctctgtctgggactcctggccttggctcagagacaggaacatcaggggaggagatcagnatgaagaacgagttggtcttgagccatgcttagcggcagtgaatctctttgcttaaggagcaaatcagcnaatctctggttggtaaagtgccacctncggcccg

SEQ ID NO: 499 - DNA, 207 bp, Homo sapiens
  misc_feature 153, 190: n = A,T,C or G
actccttcaccttcgagctccgggacactgggcgctatggcttcctgctgccagcctcccagatcatccccacagccaaggagacgtggctggcgcttctgaccatcatggagcacaccctgaatcacccctactgagctgaccctttgacancattcttgtcctcctctctggccccatccaggcaaanaaataaagtttgagtgc

SEQ ID NO: 500 - DNA, 477 bp, Homo sapiens
  misc_feature 35, 61, 69, 73, 115, 142, 158, 202, 205, 223, 233, 261, 308,317, 320, 328, 334, 356, 379, 447, 453: n = A,T,C or G
atactgggggctttagctgttggcagctatggggntcttaatccatttcacatagttgtanaccttggngtanactccaggcttgttcttctgggcacagccatcaccccagganacaactccttggagctgtccattgcanaccacagggccaccanaatcaccctggcaggaatccttgcctccctcgaggaagcccacncanaacatgttgttggtaatntttccagggnaggaggcttcacactcagcctggctcancacaggagcatccaggcactgcagctcgtctgggtagtcggcaccanaactcaaantgntgccccanccgganatgagggactcggtgccagcanctggaggggcagtgggcaaaaanatggcggacacccgggaattgatgacggcaggtgaggagagcttgatcagcaggatgtcattgtccanagtccngctgttgtatttggggtgggggat

SEQ ID NO: 501 - DNA, 147 bp, Homo sapiens
  misc_feature 48, 111, 124: n = A,T,C or G
acaagctttttttttttttttttttttttttttggaattttctgaganatctttattttttattcaggatgggggatcgatcagcactgccagctgggccttggttctagnggcttgctatggnctcctcaatccagtcgatgaagg

SEQ ID NO: 502 - DNA, 305 bp, Homo sapiens
  misc_feature 58: n = A,T,C or G
ggtcatctcagttcttttcttccttgactgcaagatgaaactccttgtgctagctgtnctgctcacagtggccgccgccgacagcggcatcagccctcgggccgtgtggcagttccgcaaaatgatcaagtgcgtgatcccggggagtgaccccttcttggaatacaacaactacggctgctactgtggcttggggggctcaggcacccccgtggatgaactggacaagtgctgccagacacatgacaactgctatgaccaggccaagaagctggacagctgtaaatttctgctggacaacccgt

SEQ ID NO: 503 - DNA, 262 bp, Homo sapiens
  misc_feature 19, 54, 58, 93: n = A,T,C or G
actcacccaacaccacctnttaggtcagatccctcgagatgcagtggccggcantttntacccaatcgggggcgatgaggctaccgccacacntgtggtagaagcttccacttttctcatactgcagggaaacctgccagggccagctgtaggggaccgcatcctcaccatggacaacgcggctggaagagtgagaggaaggtgggccatagcctgaggcaacggccacaaggaggagggaactgagcagccggagcatcat

SEQ ID NO: 504 - DNA, 563 bp, Homo sapiens
  misc_feature 20, 58, 319, 486, 553, 562: n = A,T,C or G
acatttacaaagatgcgttnaaatagtgctctaagagttttgttcagtggctcacttnggctaaaatgcagaaatgcatgctgtcagcgttggtatttcacattcaatggagctgaatgttcaggacctcttcccattgaagctataatttatttggaccaaggaagccctgaaatgaattcaacaattaatattcatcgcacttcttctgtggaaggactttgtgaaggaattggtgctggattagtggatgttgctatctgggttggcacttgttcagattacccaaaaggagatgcttctactggatggaattcantttctcgcatcattattgaagaactaccaaaataaatgctttaattttcatttgttacctctttttttattatgccttggaatggttcacttaaatgacattttaaataagtttatgtatacatctgaatgaaaagcaaagctaaatatgtttacagaccaaagtgngatttcacactgtttttaaatctagcattattcattttgcttcaatcaaaagggggcttcaatattntttttagtng

SEQ ID NO: 505 - DNA, 463 bp, Homo sapiens
  misc_feature 22, 58, 296, 396, 404, 433, 462: n = A,T,C or G
actgtgtagggaggagctcttnatcatgatggttgtcacaggagaaagcgggtgcatntttgcaaaactatatacctgctgtggtttgtgttttcttttctgctgagtaatgaagttgtaagttcacactggcacattctcagggctgtgcagattatttgcactttatttcataggtgaataagtgctttttagctttctttgtatattgagttgcttttgaattgcttcccatatttttatttcatacaaactgaacaattgtggcccctctattttatttataaaggttcagngtatctttgcctgcctacatcaatctgcaagggagttgcagaaagcctcatgttcatcgagccgtgagtcacaaccaatttctaagctgttataacaaanaagcgttngctttttttcacaagtaactttaaaagcnggagtttacaaagaaaacattttcaatana

SEQ ID NO: 506 - DNA, 482 bp, Homo sapiens
acaactaggtccttccccgtttcccctataaagcctataaagtcttctatgaaacatttttaattccattctcagacagaggctcccagaatccagtgttttggttggtctccgctacaaatgctttttctgatatttgtgtgtttgcatgtccctctctgagactttctaaaatttgattgttaattggctgttatatgcatgaagttctggacttggtgtcccaagctctttatagatttactttttttctccccctcctgccattaaataatcacccttgagcttctctcaacttactctccatcaataaccattgtattcgttccattacagccctccttaatacaaaacaatgacgacaacaacaaaccattcaaacttccaaccaacttcccctgaaggcacagaaggtgagacctaagggaaaagaaatccaccctctttaacatcagctaacagcataggagtaaatgcctggt

SEQ ID NO: 507 - DNA, 698 bp, Homo sapiens
  misc_feature 57, 626, 659, 687: n = A,T,C or G
acattgacgtttcaaatagttactgactcagcaagaattcaaagaactgtctttgtnttctactacttcttctctcctaacatctctattccaaactgtggcggttacctggataccttggaaggatccttcaccagccccaattacccaaagccgcatcctgagctggcttattgtgtgtggcacatacaagtggagaaagattacaagataaaactaaacttcaaagagattttcctagaaatagacaaacagtgcaaatttgattttcttgccatctatgatggcccctccaccaactctggcctgattggacaagtctgtggccgtgtgactcccaccttcgaatcgtcatcaaactctctgactgtcgtgttgtctacagattatgccaattcttaccggggattttctgcttcctacacctcaatttatgcagaaaacatcaacactacatctttaacttgctcttctgacaggatgagagttattataagcaaatcctacctagaggcttttaactctaatgggaataacttgcaactaaaagacccaacttgcagaccaaaattatcaaatgttgtggaattttctgccctcttaatggatgtggtacctgccccggncgggcaagggcggaattccagcacactggcggnccgttactagtgggatcccgagctccgnaccaagcttgg

SEQ ID NO: 508 - DNA, 414 bp, Homo sapiens
  misc_feature 17, 20, 50: n = A,T,C or G
gaaactttgagaagacnttnttggctctgatgaagaccccagtcctcttngacatttatgagataaaggaagccatcaagggggttggcactgatgaagcctgcctgattgagatcctcgcttcccgcagcaatgagcacatccgagaattaaacagagcctacaaagcagaattcaaaaagaccctggaagaggccattcgaagcgacacatcagggcacttccagcggctcctcatctctctctctcagggaaaccgtgatgaaagcacaaacgtggacatgtcactcgcccagagagatgcccaggagctgtatgcggccggggagaaccgcctgggaacagacgagtccaagttcaatgcggttctgtgctcccggagccgggcccacctggtagcagttttcaatgagt

SEQ ID NO: 509 - DNA, 402 bp, Homo sapiens
  misc_feature 20, 21, 23, 366: n = A,T,C or G
accagttttcactaactcanntnaagttagcaaattacaaattttagaacagattcattttctgtctcacccaatgtgggtgaccacaaagatatttactttctatgttattaggtagcaaattaatttgatatactacacagcttccaagttaccttaggatatttcaaagtgtttcaaaactggtaaagaataattcatttccagcctgaaatacaatgcagaatggaccatttaggggtaaataacctcacttaatcactctttcctgctaacaaaaataatacaaatatttgtttatattaggcttactaaattaatgacaactttgaaattatctagatttggttacattgctatattgcncttgagaacaatgacaaaaaacatcagagattcagc

SEQ ID NO: 510 - DNA, 496 bp, Homo sapiens
  misc_feature 20, 50: n = A,T,C or G
acctgtggatttttctattntgatgttttcgttttgccaatataatgagnattactttggccttgggggacagaaaggaggaagttctgacttttcagggctaccttatttctactaaggacccagagcaggcctgtccatgccattccttcgcacagatgaaactgagctgggactggaaaggacagcccttgacctgggttctgggtataatttgcacttttgagactggtagctaaccatcttatgagtgccaatgtgtcatttagtaaaacttaaatagaaacaaggtccttcaaatgttcctttggccaaaagctgaagggagttactgagaaaatagttaacaattactgtcaggtgtcatcactgttcaaaaggtaagcacatttagaattttgttcttgacagttaactgactaatcttacttccacaaaatatgtgaatttgctgcttctgagaggcaatgtgaaagagggagtattacttttatgt

SEQ ID NO: 511 - DNA, 878 bp, Homo sapiens
  misc_feature 21, 58, 689, 755, 770, 778, 810, 828, 854, 873: n = A,T,C or G
gttgtgaaaatacatgagatnaatcatgaaggccactatcatcctccttctgcttgcncaagtttcctgggctggaccgtttcaacagagaggcttatttgactttatgctagaagatgaggcttctgggataggcccagaagttcctgatgaccgcgacttcgagccctccctaggcccagtgtgccccttccgctgtcaatgccatcttcgagtggtccagtgttctgatttgggtctggacaaagtgccaaaggatcttccccctgacacaactctgctagacctgcaaaacaacaaaataaccgaaatcaaagatggagactttaagaacctgaagaaccttcacgcattgattcttgtcaacaataaaattagcaaagttagtcctggagcatttacacctttggtgaagttggaacgactttatctgtccaagaatcagctgaaggaattgccagaaaaaatgcccaaaactcttcaggagctgcgtgcccatgagaatgagatcaccaaagtacgaaaagttactttcaatggactgaaccagatgattgtcatagaactgggcaccaatccgctgaagagctcaggaattgaaaatggggctttccagggaatgaagaagctctcctacatccgcattgctgatacccgatatcaccagcattcctcaaggtcttcctccntcccttacggaattacatcttgatggcaacaaaaatcagcagagttgatgcagcttagcctgaaanggactgaataatttnggctaaanttgggattggagtttcaacagcatctcttgcnggttgacaaagggctctnttgggccaaccccccctcatcttgangggagcttcccttgggacnaccaa

SEQ ID NO: 512 - DNA, 663 bp, Homo sapiens
  misc_feature 22, 53, 58, 611, 638, 657: n = A,T,C or G
acttgcatttcaaagcttattngatataaatggagattttaaagtagaaatanatatntattccatgtttttaaaagattactttctactttgtgtttcacagacattgaatatattaaattattccatattttcttttcagtgaaaaattttttaaatggaagactgttctaaaatcacttttttccctaatccaatttttagagtggctagtagtttcttcatttgaaattgtaagcatccggtcagtaagaatgcccatccagttttctatatttcatagtcaaagccttgaaagcatctacaaacctctttttttaggttttgtccatagcatcagttgatccttactaagtttttcatgggagacttccttcatcacatcttatgttgaaatcactttctgtagtcaaagtataccaaaaccaatttatctgaactaaattctaaagtatggttatacaaaccatatacatctggttaccaaacataaatgctgaacattccatattattatagttaatgtcttaacccagcttgcaagtgaatggaaaaaaaaataagcttcaaactaggtattctgggaatgatgtaatgctctgaatttagtntgatatagagaaaacttttttgtgctnaaaatactttttaaaatcnattttg

SEQ ID NO: 513 - DNA, 468 bp, Homo sapiens
accctctcagctccaggtggttctgaggtgcctgtcccacccccacccccagctcaatggactggaaggggaagggacacacaagaagaagggcaccctagttctacctcaggcagctcaagcagcgaccgccccctcccctagctgtgggagtgagggtcccatgtggtggcacaggcccccttgagtggggttatctctgtgttaggggtatatgatgggggagtagatctttctaggagggagacactggcccctcaaatcgtccagcgaccttcctcatccaccccatccctccccagttcattgcactttgattagcagcggaacaaggagtcagacattttaagatggtggcagtagaggctatggacagggcatgccaccgtgggctcatatggggctgggagtagttgtctttcctggcactaacgttgagcccctggaggcactgaagtgcttaagtgt

SEQ ID NO: 514 - DNA, 788 bp, Homo sapiens
  misc_feature 20, 681, 720, 743, 763: n = A,T,C or G
accactgcactccagcctgngtgacaaagtgagaccctgtctcaataaaaaataaaaataaaaaaagtatgttattatttcctgttttattgtctaaaatggtctatgaagtgctctgttgtgtttttatgtttctcaaatctcctttaaaaaatataaataaagaattttaaagaatttttaaaattattttgtcaagaattatattttcaggattttaatcatttgggattggaattttggggattttggacttcagggattttgatctttcaggatttcatcatttgggattataacattcaagattgtgtcttttgggattatggcccaaacccatgcaatgggccagttctttgaaaggaatagtgttccataactcacacaaggagaaatagaaaatttgaataggcctatacctgttaaactaaatcaataactaataaccttctataatagaaagcaccaggcttagatgggttcactgatgattgatcaaacatttaagaaataaatctttgacccagaaatatttccttaaaattttttttctaagaaagaaatcataccaattctctacaatagcttccaaaaaaatagaagctaagggaacacatcctaactgactctagggagaccagcattactctaatactaaaatcagataaagacatgaccaangaaagggaaaactacagtctctcataaacatagatgcanaaatctttaccaaatattagccnatcaaatgcaataatggggnaaaaagaatggattttttatgaccc

SEQ ID NO: 515 - DNA, 687 bp, Homo sapiens
  misc_feature 660, 682: n = A,T,C or G
ctatgttcaattggatgtatctgttcaaatttattcccacgtgacgtggaagtccttcgttggatgtcacaacactacatttaaggttggtaaggatgacttggaggtccatggttttcattaccaacattttaagattctgaatgtcgatggagtctcactgaagagtcaccaaaggtgcctgccctcctcccctgctgggaagtgtcagttggagactgtcccaagggtgctgaagaatccagtggcaggggttctggctgccttccatctgagtgtgggatgggaggggtgttcatgatcatttggatatagcaatctactctgagaaatggaacacaaggagttacctatcactttcacttataattccaaaagatgactacaaccatgtccatgctcagattcaaacagttttccatatcacttttgggtggtaagatgatttacagttttttttttaattggcagcaccactaaccattccttacattcttttttgtatgtgtggttttccttttatttaacccgcagccgacatcgtagtttctcgttttgtttgtttacagagctgttgcatgacttatgttaccatcctaaaaaacactatattaaacatggaataaattgtctttttatgaattacggctttttgaacancctgggttgggattttttttgnttttc

SEQ ID NO: 516 - DNA, 870 bp, Homo sapiens
  misc_feature 617, 732, 756, 768, 781, 784, 792, 793, 800, 807, 810, 812,815, 816, 858, 860: n = A,T,C or G
accaagcaatgaagaacaaattaaaaatctgctacaattggaggctcaagaacatctccagcttgatttttggaaatcacccaccaccccaggggagacagcccacgtccgagttcccttcgtcaacgtccaggcagtcaaagtgttcttggagtcccagggaattgcctattccatcatgattgaagacgtgcaggtcctgttggacaaagagaatgaagaaatgctttttaataggagaagagaacggagtggtaacttcaattttggggcctaccataccctggaagagatttcccaagaaatggataacctcgtggctgagcaccctggtctagtgagcaaagtgaatattggctcttcttttgagaaccggcctatgaacgtgctcaagttcagcaccggaggagacaagccagctatctggctggatgctgggatccatgctcgagagtgggttacacaagctacggcactttggacagcaaataagattgtttctgattatggaaaggacccatccatcacttccattcttggatgccctggatatcttcctcctgccaagtcacaaaccctgatggatacgtgttctctcaaaccaaaaatcgtatgtnggcggaagacccggtccaagggtttctggaacctctggtttggtgtggatcctacccggaactgggatgcaggttttgggaggacctggagccagcagcaacccttggcttttgnttcatacccaccggacccaggggnccacctttgaangtttgaaagtggnaantccattgnnggggacnttcttcnagnangtnnttgggaaaaaagtcaaggggcctttcttttccccttccccancnttttttcccc

SEQ ID NO: 517 - DNA, 751 bp, Homo sapiens
  misc_feature 22, 59, 447, 556, 576, 591, 617, 644, 646, 657, 659, 662,663, 665, 670, 725, 726: n = A,T,C or G
acaaggcagctggcaacgtttncttcaagacacagaggagaaatccagatcattctttncttcccaggcagacccactcagtgatcctgatcagatgaacgaggacaagcgccattcacagggcacattcaccagtgactacagcaagtatctggactccaggcgtgcccaagattttgtgcagtggttgatgaataccaagaggaacaggaataacattgccaaacgtcacgatgaatttgagagacatgctgaagggacctttaccagtgatgtaagttcttatttggaaggccaagctgccaaggaattcattgcttggctggtgaaaggccgaggaaggcgagatttcccagaagaggtcgccattgttgaagaacttggccgcagacatgctgatggttctttctctgatgagatgaacaccattcttgataatcttgccgncagggactttataaactggttgattcagaccaaaatcactgacaggaaataactatatcactattcaagatcatcttcacaacatcacctgctagccacgtgggatgtntgaaaatgttaagtcctgtnaattttaagaggtgnattctggaggccacattgcttttgcnatgccaataaaataaattttcttttancngctggggtagncnaannantaccnaatgggaatacaggttttatcaaaatattggctaaaatattcaggcttttaaaannatgaaagcgcctaagaatcctggta

SEQ ID NO: 518 - DNA, 224 bp, Homo sapiens
  misc_feature 20, 53, 56, 58, 59: n = A,T,C or G
acacccacacctattcatanttgtgctctggctcggcaatcacctgtagcagnaanannaaagagtgtgaggccttcatttgcaactgcgaccgcaacgctgccatctgtttttcaaaagctccatataacaaggcacacaagaacctggacaccaagaagtattgtcagagttgaatatcacctctcaaaagcatcacctctatctgcctcatctcacactgt

SEQ ID NO: 519 - DNA, 405 bp, Homo sapiens
  misc_feature 21, 51, 56: n = A,T,C or G
acgccgccgacatcgactatntaacaggcaccaacaacatggacggccacntcttnttcagcatcgacatgcctgccatcaacaagggcaacaagaaagtcacggaggaggacttctacaagctggtcagtgagttcacaatcaccaaggggctcagaggcgccaagacgacctttgatgtctacactgagtcctgggcccaggacccatcccaggagaataagaagaagactgtggtggactttgagaccgatgtcctcttcctggtgcccaccgagattgccctagcccagcacagagccaatgccaagagtgccaagacctacgcctacctgttttcccatccctctcggatgcccgtctaccccaaatgggtgggggccgaccatgcagatgacattcagt

SEQ ID NO: 520 - DNA, 155 bp, Homo sapiens
  misc_feature 17, 21, 42, 59, 67, 142, 154: n = A,T,C or G
acattgcccgggacccntttntccagtccacacagatgcagntcacctggcggcatttntaacattntcttgcacatggccgatggccagctgccctccgccttgtctaagaagccatggatgatgaagcgtgtcttgcggnccagttggaagnt

SEQ ID NO: 521 - DNA, 189 bp, Homo sapiens
  misc_feature 1, 29, 59, 62, 64, 69, 74, 121, 122, 125, 134, 174, 183: n = A,T,C or G
ncgacgtccgaactgccacgatgctgttnctttggactctttcactgctgcttgggagnggnanttttnaaaanaagtttgctacgaaagactcggctgcttcagtgatgactccccatgnncangaattacgnaaagacccctccatatattgccttggtctccaaaagatgncaacacccncttcct

SEQ ID NO: 522 - DNA, 280 bp, Homo sapiens
  misc_feature 19, 265, 271: n = A,T,C or G
acagaaggtgaaggagctngaggacctggagcacctgcagctggacttctggcggtgccctgcccaccctggctcccccatcgacgtccgagtgcccttccccagcatccaggcggtcaagatctttctggagtcccacggcatcagctatgagaccatgatcgaggacgtgcagtcgctgctggacgaggagcaggagcagatgttcgccttccggtcccgggcgcgctccaccgacacttttaactacgccacctaccacacnctgcangaaaggcta

SEQ ID NO: 523 - DNA, 191 bp, Homo sapiens
  misc_feature 20, 21, 22, 53, 58: n = A,T,C or G
tggcactcttggttctggtnnntgtggccctggcatctgctcatcatggtggngagcnctttgaaggcgagaaggtgttccgtgttaacgttgaagatgaaaatcacattaacataatccgcgagttggccagcacgacccagattgacttctggaagccagattctgtcacacaaatcaaacctcacagt

SEQ ID NO: 524 - DNA, 582 bp, Homo sapiens
  misc_feature 19, 55, 59, 509, 571, 582: n = A,T,C or G
ggaaaatccagaaagctanacaacactgaaggggtgaaataaaagtccagcgatntttngaaagaaaagagaagtgacagaaacaactttacctggactgaagataaaagcacagacaagagaacaatgccctggacatggctccagagatccacatgacaggcccaatgtgcctcattgagaacactaatggggaactggtggcgaatccagaagctctgaaaatcctgtctgccattacacagcctgtggtggtggtggcaattgtgggcctctaccgcacaggaaaatcctacctgatgaacaagctagctgggaagaataagggcttctctctgggctccacagtgaaatctcacaccaaaggaatctggatgtggtgtgtgcctcaccccaaaaagccagaacacaccttagtcctgcttgacactgagggcctgggagatgtaaaagaagggtgacaacccagaatgactcctggatcttcaccctgccgtcctcctgagcangcactcttcgtgtatttgacaaacccactgttcttgtattggaattgcccagggggagctantcctgtcctcn

SEQ ID NO: 525 - DNA, 481 bp, Homo sapiens
  misc_feature 52, 54, 55: n = A,T,C or G
agcaaagcgaagattttcaagccagcgccctactgggaaggaacagctgtgntnnatggagaatttaaggagctgaagttaactgattatcgtgggaaatacttggttttcttcttctacccacttgatttcacatttgtgtgtccaactgaaattatcgcttttggcgacagacttgaagaattcagatctataaatactgaagtggtagcatgctctgttgattcacagtttacccatttggcctggattaatacccctcgaagacaaggaggacttgggccaataaggattccacttctttcagatttgacccatcagatctcaaaggactatggtgtatacctagaggactcaggccacactcttagaggtctcttcattattgatgacaaaggaatcctaagacaaattactctgaatgatcttcctgtgggtagatcagtggatgagacactacgtttggttcaagcattccagt

SEQ ID NO: 526 - DNA, 431 bp, Homo sapiens
  misc_feature 51, 53, 54: n = A,T,C or G
taaaaattgaaaaatttttccacaagtggtgcaaatgtttaaactacctcntnncactttcccatgagtgtgatccacattgttaggccgctgacctagacagagatgaactgaggtccttgttttgttttgttcataatacaaaggtgctaattaatagtatttcagatacttgaagaatgttgatggtgctagaagaatttgagaagaaatactcctgtattgagttgtatcgtgtggtgtattttttaaaaaatttgatttagcattcatattttccatcttattcccaattaaaagtatgcagattatttgcccaaagttgtcctcttcttcagattcagcatttgttctttgccagtctcattttcatcttcttccatggttccacagaagctttgtttcttgggcaagcagaaaaattaaattgt

SEQ ID NO: 527 - DNA, 230 bp, Homo sapiens
  misc_feature 20, 58: n = A,T,C or G
acgaacagcctctcttacanaccactggcagaatgcaggagaaatccactctctggcntggaaaccacagtccatgaaaatggcaggcttattttgtccagctttgccaaccttcaggaggtaaatagcgcgtccctcaaatgtggttccgataacactgcgagagatgagggctggattctcagtggcgacttgttgagtccaagcctctatcgtttcccacttgttgt

SEQ ID NO: 528 - DNA, 330 bp, Homo sapiens
  misc_feature 14, 20, 219: n = A,T,C or G
actcttccctgatntttttnttcccaagaggcccaccctctggccaggacttattgagaaggaaatgttctctaatatggcatttccaccttctgtgtattttgctgtgagatctttgacagtcatttggccccctgagggccagatgtcatctttcttcacgtgtgaattctcaataatcataactttcgagagttggccattcttgtatggtttggntgacttggtaggtttaccttctgttggcatgtcaatgaacttaaagactcggctcacagatcgcatcaagctatccacatctatgctggagtttacagcccactgcaatgt

SEQ ID NO: 529 - DNA, 295 bp, Homo sapiens
gccagatgtttctatgtggattctgtaatgttcctccatacagttaaaacatcctaacttgtttttcaagctcactcaggcctacgccaaacgtttctgttttttttaaccatgaggtttaatttatttttgtgataggagggatatttacatattttagtggaccacattttaagttggatggtgtgctctaaaatactgaaaaacaatagcccatatacctatgtatttgtttttgatgggttgtttactctgaaataaaatgtatggttttcttaaaaggaagttttaaagt

SEQ ID NO: 530 - DNA, 265 bp, Homo sapiens
ctcagttggaaataataaaagattcacctgagacaaacatttttccaaagacagtagcacagtcattgtcataagcatgttaatatgtctattttgcagaaaagaatatgctacaagtcatgcaattcacattttcaatagcattctgacagaaattaaagacaattccaattgtgtcaaacatttaatgaatagtaagttctactttctgcccttgggtatataaatggtgtctttcagtgaagtggtgaaaaacagatcatgt

SEQ ID NO: 531 - DNA, 523 bp, Homo sapiens
  misc_feature 519: n = A,T,C or G
acaagtaaagtaaacttaggtttgttttctctcccatggctggataaaccaaatctgatacatccacatttaaggttgttttccaagttggtttccataaaaggcctttaacaataataggcttttaacaacaaaaaggtatccctcccatcacaatgagagcttgatgagggctcaaaagtgacttcaaaaactgtaaataattattttccttggatggctttaaaaacagctactgatagcaaatcagaaacactaaagaaaaaagacaataaggaaacagctgtttgtctagtgaatccataataaataccaatttgaggctatagattacaaagccaaaatattcttataggaaagttaatgtttatatttacaatcccatggactaaaaaaactgtctaatatcttaaagactgagtctacctttatttaacattgtttatacacaaagacccaagggatggtagaattcttgatccttctggacaaaagcatagtgagaggggactgaaattnacaa

SEQ ID NO: 532 - DNA, 318 bp, Homo sapiens
actgtgatttgtttcaagcttaggaaaactagtatattagagtatgttctaggaaattaaaagatctggttagagtaaaaagttctttttaaggttcttaactaattttttcacaactaagaaaataaatgaagtattcttaggctgaaattcatcttattttatcataaattagattgtaggggcagcctacatttttgtgtatgtgtttttatttcttaaatgattgtgtgagcctggtgacattttatggttcttgtgatctaaactgtttttccaattcacatcttttgtcgtgaagtgatattatactagagt

SEQ ID NO: 533 - DNA, 359 bp, Homo sapiens
acgagagtgtagccaaagtgagaggctgagagcaaaggagacatttttttcagttttgagtcgagtatccagacagaggcaaatcattttgtttaactttttattaaagtgtaactatagaaacacatcaatgatttttcacaagtggagcacgtgcatacaatcggcaccccagaagccccccgtcagattcccttccagttaactacctctccaagggaaaccactatcctgagttctaagcgcatagattagttctgtctggtttggggagatatataaatggaattatgcattcttcgtatctggtttcttttcaccaatattatgtttgtgagatttttgttgcatgtatttgt

SEQ ID NO: 534 - DNA, 366 bp, Homo sapiens
acatattttgctcttaaagtttataaatatacgtatattgagagtgtccacgtctcctcgctgaaccttaggaatcccttggcaccatgtcctgtgtgcattataaattttcctctaaactcaactatgataccgtcacctttgatgggctccacatctccctctgcgacttaaagaagcagattatggggagagagaagctgaaagctgccgactgcgacctgcagatcaccaatgcgcagacgaaagagggtaagggccgcttggtcttaagatatttggtggctggagagagatactagctagaaggtgcctgggaggaagctaatcgccattatgtctctagtggggactgttcgttctagt

SEQ ID NO: 535 - DNA, 210 bp, Homo sapiens
ccgggcaggtactctgcttctaaatacaagacatcatttagtttgtaattctatctgtaaagtcatggagatttttttcagcaataaactcaacaatttgagaatgctttatgaaaaagaaaaacagcaaagtttacctcaattgaaagagggtgagggtagagtcagtaactgattaacctaagactccaccttccactccactcaggt

SEQ ID NO: 536 - DNA, 649 bp, Homo sapiens
  misc_feature 508, 598: n = A,T,C or G
gtttcctcctggagtagtgaatattgttcctggttatgggcctacagcaggggcagccatttcttctcacatggatatagacaaagtagccttcacaggatcaacagaggttggcaagttgatcaaagaagctgccgggaaaagcaatctgaagagggtgaccctggagcttggaggaaagagcccttgcattgtgttagctgatgccgacttggacaatgctgttgaatttgcacaccatggggtattctaccaccagggccagtgttgtatagccgcatccaggatttttgtggaagaatcaatttatgatgagtttgttcgaaggagtgttgagcgggctaagaagtatatccttggaaatcctctgaccccaggagtcactcaaggccctcagattgacaaggaacaatatgataaaatacttgacctcattgagagtgggaagaaagaaggggccaaactggaatgtggaggaggcccgtgggggaataaaggctactttgtncagcccacagtgttctctatgttacagatgagatgcgcattaccaaagaggagatttttggaccagtgcagcaatcatgaagtttaatcnttagatgacgtgatcaaagagcaacaatactttctatggctatcagcagga

SEQ ID NO: 537 - DNA, 294 bp, Homo sapiens
acttggcccgggtcacgcgtgggtcctctccgggctcgggagtagcatcctcaggagtagtgtagcgagcaaattctggaaagtagtcctcaatcttcgatttcccagcaaggactttctcagcgagcagatcttgcttgttgaggaacaggatcacagagatggtgcgcagccatctgttgttccagatgctcttgaagaggttcagagcctcctgcaggctgactatgtgccgagcgatcaggacctgcttcgctgccgtgtcctgacttctggaatctttgagaccaagtt

SEQ ID NO: 538 - DNA, 464 bp, Homo sapiens
ccacgctcagcctcttgctcgccccggtgctgtggagagctgcaatcacgaggtgtgtgcccagaccggagagacggtccagcctctgatggctcggagatgatggaccgtggaagggaagcgtctgtggggagtgagcgcttagatggccagcagctgctccttctgggaagctcgcaccttggcaacagaacagccctctagcagagcgtcagtgcagtcgtgttatcccggcttttacagaatattcttgtcctattttagaattttccggagtagtttatttgcagtctgttgattatgtgcagtagatccgggacactgcgttttaccgatcaccttgaatgtggtgcctggatgtgccttttttttttccctgaaattattattaattttctattgtgagttcatcagttcatagtttttttagtaaagaagcaaaattaaaaggcttttaaaaatgt

SEQ ID NO: 539 - DNA, 409 bp, Homo sapiens
  misc_feature 399: n = A,T,C or G
cagcattttgggaggccgaggcgggtagatcacttgaggtcaggagtttcagaccagcctggtcaacatggtgaaaccccatctctactaaaaatgcaaaaaattatctgggcttggtggtgcacacctgcaatcccagctacataggaagctgaggcaggagaatcacttaaacctgggaggtggaggttgcagtgagctgagattgcaccactgcactccaccctgggtgacagagtgagactctgtctcaaaaaaatatataaaataaattgaacaataaaaaaataaaatggccatggaatcgttttcagatgaggagatgcagaatgcccatggagacatgctcccaattgtcacttgtttgggacatcaagattttagccagttccatgtgtnacctggatgt

SEQ ID NO: 540 - DNA, 221 bp, Homo sapiens
acgagtcctccaggtaaatattacacaaatgggaagcatcttgaatttttaagtatatttcaatacataaatttttatgcatgctttaaacaaacagtattttttttaaatgagagaatctaacaaaaaaagtctgaccagcaccagcatttaaattttctgattttaatattagtctgacatagcgttagtaaccatgctgcactgaaacatgtaatggt

SEQ ID NO: 541 - DNA, 353 bp, Homo sapiens
  misc_feature 320: n = A,T,C or G
acaatgtgttactgtgacagttagtattaggtgtcaacctgactagactgagggattcctagatggctgatgaagcgttgttcctgggtgtgtctgtgagggtgttgccagagaagactgacatgtgagtgagtggactgtgagaggaaccagcccacatgtccagctggactctcaatgtgggtgggacaccattcaatcagctttaagcacagctaaacaatggggataagtagattgcttgctgagtctgctctctctctcatgctgtgacagatgcctggcttcctctcctcctgcccttagacatcagactccangttcttcagcctttggactctaggacttgcact

SEQ ID NO: 542 - DNA, 539 bp, Homo sapiens
ccctgtcctgttggaaaaacagatgatggatgtctagaaaacacccctgacactgcagagttcagtcgagagttccagttgcaccagcatctctttgatccggaacatgactatccaggcttgggcaagtggaacaagaaactcctttacgagaagatgaagggaggagagagacgaaagcggaggagtgtcaatccatatctacaaggacagagactggataatgttgttgcaaagaagtctgtcccccatttttcagatgaggataaggatccagagtaaagagaagatgctagacgaaaacccacattacctgttaggcctcagcatggcttatgtgcacgtgtaaatggagtccctgtgaatgacagcatgtttcttacatagataattatggatacaaagcagctgtatgtagatagtgtattgtcttcacaccgatgattctgctttttgctaaattagaataagagcttttttgtttcttgggtttttaaaatgtgaatctgcaattgatcataaaaattaaaatgtgaatg

SEQ ID NO: 543 - DNA, 259 bp, Homo sapiens
accagaccttggaggaggtgttcattgaagttcaggtgccgccaggcacgcgcgcccaggatatccagtgcggcctccagagccggcatgtggcgctgtcggtgggcggccgcgagatcctcaagggcaaactctttgattctacaatagctgatgagggaacatggactttggaggacagaaaaatggttcgtattgttcttacaaagacaaagagagatgcagcaaattgttggacttctctactagaatctgaata

SEQ ID NO: 544 - DNA, 227 bp, Homo sapiens
actgggaagcacaatgtttttgagagaaccagtctggagggcggccaggttctgcaaagggcttgattgctctgctaactgatacccaattttgatcgccacttctcatgacagaagatgctaaacatagcttctctcggatggaccatggctctgtggggccagtgcttagcagcttgtgtttgcccgttcccgtcgccatcttggccccgaagtctccaaccctg

SEQ ID NO: 545 - DNA, 465 bp, Homo sapiens
actttgggaggccaagatgggaagaagattgtttcaggccaggagtttcagaccagcttgggcaacatagcaagactccatctctgcaaaaaatataataagtagccaggtatggtggcatgtgcctgtggtcccagctgctcagggggctgaggcaagacgatcacttgagcccaggagcaccaggctgcgatgagccctgctcacgcaacggcactccaacctgggtgacaaagcaagactgtgtaaaaaaaaaagggcacataggaattgggtggcaaattcaagcctatggtgcacacaaaaatacctgcaaaccacaaataaagaaatggaggaggcaatcggtgcgggtctttggacacaagaagacagccacagctgtggcacactgcaaacgcggcaatggtctcatcaaggtgaacgggcggcccctggagaagattgagccgcccacgctacagt

SEQ ID NO: 546 - DNA, 266 bp, Homo sapiens
accaactgcaaatatctcaatattgtttgggacagactccaaattagagtttggttaatactttcaggacttttactttcaccaccagatcattgtgatttgctagtgctttgattttcttaacacaaactccagactctttgaataagaaaaaaagtgaacttctgctgaattctttcctggatgatgcgagcccttcattttttatgttgtcatttatattctcaaatagggtaaggatattaagaagaatctctctatcccat

SEQ ID NO: 547 - DNA, 484 bp, Homo sapiens
  misc_feature 474: n = A,T,C or G
acgagttgtttccttaactgttttagtcagccagccacagcaacacccagaaacacatgaattagggatctgttttaggtattcaggtatgggagtggctctactcaatgttcggcttagctgtttggtggcaaattgcagtgctccatttagagtggcatgatctctagagagccggctgggacttgtaagaggcttttgaaaaggtgggactccacaagaggccagagggggccattcaggaattggttccagtttggggacacaatgggaacaatgggagagtcttagacctatctctcgaagtatatggactggtgtgcttggatccaacagtttagcatgatacaaccaggaattaggatttaaaggtttccaagttgtggaatattttaaaaggcacttaacctgccaggcaagactctcaagaggcgataagttgggcaccatagagtcctcttcttcagaggaatnccactcttcc

SEQ ID NO: 548 - DNA, 269 bp, Homo sapiens
gctaattgtgtggcctggttgggaggggctatttttggagcattacaagatatacttgggagccgttctgtttcaaaggaatattataatcagacgggccgtatacctgattggtgttctctcaataacccacctttggaaatgatgtttgatgtcgggaaaactcaaccacctctgatgaagagagcattttccactgagaaatagaagtttgattaaaaatcaaccttgcttcatatcaaatatttaaccaattataagcaaattgt

SEQ ID NO: 549 - DNA, 338 bp, Homo sapiens
actcactgttcttcataaacaccagctaaaaactggtataaaaaaaagaaaaaaacccccaaatcatgggattcatacaaagatgactgagtgggggcaaggaagactcaacctaaccagcattttaccaaatctgtcatgtttgaatcgtgagagctccatggaagaaaggagatgctaagtagcgcttcaaagcttcagaccacaaccaaaacacagcaacatttcaaatagaagcagtagccaaacactgctcactttgatatggttcaaggatgctgacatcaatatttatctgctcattcatccaggaagaaggggacatcagttactactgt

SEQ ID NO: 550 - DNA, 546 bp, Homo sapiens
  misc_feature 530: n = A,T,C or G
ggagctgctcgacgaccaagaggcgaagagggaagcagagactttcaaggaacaaggaaatgcatactatgccaagaaagattacaatgaagcttataattattatacaaaagccatagatatgtgtcctaaaaatgctagctattatggtaatcgagcagccaccttgatgatgcttggaaggttccgggaagctcttggagatgcacaacagtcagtgaggttggatgacagttttgtccggggacatctacgagagggcaagtgccacctctctctggggaatgccatggcagcatgtcgcagcttccagagagccctagaactggatcataaaaatgctcaggcacaacaagagttcaagaatgctaatgcagtcatggaatatgagaaaatagcagaaacagattttgagaagcgagattttcggaaggttgttttctgcatggaccgtgccctagaatttgcccctgcctgccatcgcttcaaaatcctcaaggcagaatgtttagcaatgctgggtcgttatncagaagcacagtctgt

SEQ ID NO: 551 - DNA, 380 bp, Homo sapiens
acatatgtctatcagagcttttattgttctctattacatgcttgcttgctttactcactaaaaattcagttcgtagagatcagctgtctcatatctacattcttggtccatacaatctacagagtcaagtagtgctttatacttgctgatatagtaaagtcactggcttttagtgagagtggaaatcagcacccataatgttctctgttatacctaggtttctttaaacatttcagttaaggtcttagatattactactacacctcatgactggagcgaatactaaaattattcataaatgggcacaaatatgtttactgtttatactagccactaacattattaagtgcttactatgtgtctggtgcttacatacatgt

SEQ ID NO: 552 - DNA, 227 bp, Homo sapiens
acgcaatcttaaagagggagtaaggacaggaattcagggcagggctctggcagttacggtcaactaagttgtagaggtttcagcgactgcggtcagatagacattagacgtcgtcagttatcgcttctgacggcacttcccagttctctcgggtttgcacacccccactgtgggccggggaaccgggtcccggccttcgcagactccaggctctggcagatgtggcc

SEQ ID NO: 553 - DNA, 220 bp, Homo sapiens
acttggccaggatgctagttaaataccctgagatcattaattcaaaccaagtgaagcgagttcctggtcaaggctcatctgaagatgacctgcaggaagaggaacaaattgagcaggccatcaaagagcatttgaatcaaggcagctctcaggagactgacaagctggccccggtgagcaaaaggttccctgtggggcccccgaagaatgatgatacccc

SEQ ID NO: 554 - DNA, 355 bp, Homo sapiens
gcctcgggaacagtaagaccgaggaccagcgcaacgaggagaaggcgcagcgtgaggccaacaaaaagatcgagaagcggctgcagaaggacaagcaggtctaccgggccacgcaccgcctgctgctgctgggtgctggagaatctggtaaaagcaccattgtgaagcagatgaggatcctacatgttaatgggtttaatggagagggcggcgaagaggacccgcaggctgcaaggagcaacagcgatggaatataatatccctagatgatggctacagtttctcatcttcccggctatgtcctatcacaatttgcatgctggaattgctcggtcttaggaacttctaataagaa

SEQ ID NO: 555 - DNA, 558 bp, Homo sapiens
  misc_feature 332, 333, 335, 437, 482, 500, 536: n = A,T,C or G
acatctttgcatttcttaaggcatgaacaatggcatacagatggaacaggttctgagaagcatcacatctttttcgacaaggccagcacaatcacaccacatcaaacagacacacttgaagtctgcactgaccgactgcttgtggcccaggagtcctgcgataggggatggtgcttccagacagtggaacaatcgtgtggtttctatgttgttgttaactttcttgatcagctttaagcaccagttaccatttgtttttctttacaaactggtcagactttggattttatattctgctccttttattctgctttccaaggacggtgtggatnntnttttttttttttttttttttttaaggaatatggttgcagcaaaacagaaaggatcccaaagtggttaggggccttgtctaatgcacttctgaaagtccattntaaagatgaatagaaaagcaaatggtaggttttcagttgacccanaaaccacacatagctatnagaaacataattgggcatagttatttattcattcanaatgtgatatgttggctagctc

SEQ ID NO: 556 - DNA, 507 bp, Homo sapiens
acaatgaaatttcttaagttttagaacatgagataaagttgtatactctactttcatgttaaaatgttaatcatgattactttaagcccacatccactgagtaaagagtcactttaaactataaatcaaagagatattaggaacattcagaattatttgtgttttgtttttgttttacattgttgctgcactggcaataagtatgtggcactgtttttatttgtttatgttatttaaatacacgcccagacacacacacacacagtttttgctttttctggaaaatctttctttctcttctctctccatgaaaattaaaacacacaagtgaatgaagtaattacatagtccaagattagaaatacaagtaaaatatataggtataggtagatagagtgcctttctgtttcttttcttttcttttttctttttttgttcttccttcctttcttccctcctccccctcatccttccctttctccttcttttcccttttttttttttttt

SEQ ID NO: 557 - DNA, 303 bp, Homo sapiens
acaagggcagggcagggcagggaagctgccaagctccgcaccccagaggagtgttctggactacagccttatcttatggtcaaattgatacccttaataagaaaggaaaggaaaggaaaacagatcctcccctctgctttttattgtaaccagaatcaccctgaggtcccttctgaaccctctgggcctgcgctaattgtaggagccacagcgctcctagggtgagaggcttagccatccctgaccctggcagtgcactggtaagcagacactgcactgaaccaactgctatgctcagaatgt

SEQ ID NO: 558 - DNA, 477 bp, Homo sapiens
acataggtagttttggccccaggaattccccttctgggaatatgccttaaaaaaagactgagcatatttttaaaaacatatatgaatgtaaggagagctatcacagcacactattgaaaacactacaaacactgaaccagtccatagcaggtcacttggaagacctgaagggaaagagaataggagcttcaacagaggcgatccggatccaaaggaaccactgggtgctgtgcggttacgtctgaggccatcacccgctgcagagccaagcctgcggcgactgggaggtgaggtgagcgctcatcaaacccagctcccacacagaacgtccgtgagtgtctgattcacacagggttcatgcagtgtgtcactccctggcatctacactcctctttgctaaactcaaatgcacccctgatcagtaaaaactattttaatacaccccctaaatatgtgtattattacacctatgaatgt

SEQ ID NO: 559 - DNA, 307 bp, Homo sapiens
acagtattttttaaggcaaataaagatgattagctcaccttgagataacaatcaggtaagatcataacaatgtctcatgatgtaaaaaatattaaagatatcaatactaagtgacagtatcactctaatataatatggatcagagcatttattttggggaggaaaacagtggtgattaccggcattttattaaacttaaaactttgtagaaagcaaacaaaattgttcttgggagaaaatcaacttttagattaaaaaaattttaagtatctaggagtatttaaatccttttcccataaataaaagt

SEQ ID NO: 560 - DNA, 454 bp, Homo sapiens
acttgtttgctttgctcacaaaggagaaaaggaaagaaacaattgaaaatatgtatatggtgaaagtatgcgagtccgagcagaaataacaaaggcaaaaggatgaggagagatggagtaagtctagagaagaaaataaatggatgagatagagagctgtctaagcaaaaaaggtgtcagacctctgatcttataaataagacacttcaaaagtagcaaaaacagttttaagaaggtgactaatagataaggtgtgttgtgtttagctatttcctgttaggtattagtaatgggttcccaatgacctgagccaaaaatgaatcaagttaaatgaaaactgacatctgatatgagcatatattattagtctattcaagcacagttttgaagttagcaaacatctaaatcctcacatctctacaaggtaggtcaaagtatgattcttctcagttgt

SEQ ID NO: 561 - DNA, 259 bp, Homo sapiens
aagctcgcccggagaacggggaggaatatgctgtggagctcctctgccatataaacaaaaagaggaaatctttcaaacatggctgtagcaaagacccactggcttggagcagccctgtctcttatccctttaattttcctcatctctggggctgaagcagcttcatttcagagaaaccagctgcttcagaaagaaccagacctcaggttggaaaatgtccaaaagtttcccagtcctgaaatgatcagggctttggagt

SEQ ID NO: 562 - DNA, 659 bp, Homo sapiens
  misc_feature 534: n = A,T,C or G
acaatgaaatttcttaagttttagaacacgagataaagttgtatactctactttcatgttaaaatgttaatcatgattactttaagcccacatccactgagtaaagagtcactttaaactttataaatcaaagagatattaggaacattcagaattatttgtgttttgtttttgttttacattgttgctgcactggcaataagtatgtggcactgtttttatttgtttatgttatttaaatacacacccaggcacacacacacacagtttttgctttttctggaaaatctttctttctcctctctctccatgaaaattaaaacacacaagtgaatgaagtaattacatagtccaagattagaaatacaagtaaaatatataggtataggtagatagagtgcctttctgtttcttttcttttcttttttctttttttgttcttccttcctttcttccctcctccccctcatccttccctttctccttcttttcccttttttttttttgacctgggagtaataaagttactttttnaatgcacgtatgcaatcttttattcctcttgttttatggataagagatttgttcaggtcaaaagttgcaaaactgttctgaagcttaatattagagacccaagtaagattgtttttagtctgctt

SEQ ID NO: 563 - DNA, 276 bp, Homo sapiens
tttagaacaagaatgaagtcattttggagtctttcatgtctaaaagatttaagttaaaaacaaagtgttacttggaaggttagcttctatcattctggatagattacagatataataaccatgttgactatgggggagagacgctgcattccagaaacgtcttaacacttgagtgaatcttcaaaggaccctgacattaaatgctgaggctttaatacacacatattttatcccaagtttataatggtggtctgaacaaggcacctgtaaataaat

SEQ ID NO: 564 - DNA, 614 bp, Homo sapiens
  misc_feature 534, 551, 575, 576: n = A,T,C or G
accaatagctctttcatagacttgtgctacaagaaggttaaaagaccagttttattttcagcattcctcatgcatttcagtggtaaccaaaaaataatttgtcaattaatagttgtgtgccaagcactcctaatttgttttattgcgtgtgtgtgcatgtgtgtatgtgtatcacaggtaataaaggcaattggatgatatctgtaggaggaaaacaatgactaatttcttccttttgaaatctttcattgatgcacatttattatgtaagatgttctgtcttgatttctgttcttagtgatgattagtatatgaatatctttctgaatttttgtaattctcgccttcacactaggatgacagactcagctaatgtttccttgtcctgaaggtttgaatggagttgaaagttttacataagtgaaaaagaaagtttatcttgggagttgagttgtcaagagaattataatttatgaatttaagtggtattcttttctgtattaatatattagcagatatttgatcttaactacnacatagctttgtttgtnaacttaccagtatgtcttgattcnnttcaatgtttcttgatagcacatggcaataccatcatc

SEQ ID NO: 565 - DNA, 563 bp, Homo sapiens
tttacagatacccccagaagacttaattgagatgctcaaaactggggagaagccgaatggatcagtggaaccggagcgggagcttgaccttcctgttgacctagatgacatctcagaggctgacttagaccatccagacctgttccaaaataggatgctctccaagagtggctaccctaaaacacctggtcgtgctgggactgaggccctaccagacgggctcagtgttgaggatattttaaatcttttagggatggagagtgcagcaaatcagaaaacgtcgtattttcccaatccatataaccaggagaaagttctgccaaggctcccttatggtgctggaagatctagatcgaaccagcttcccaaagctgcctggattccacatgttgaaaacagacagatggcatatgaaaacctgaacgacaaggatcaagaattaggtgagtacttggccaggatgctagttaaataccctgagatcattaattcaaaccaagtgaagcgagttcctggtcaaggctcatctgaagatgacctgcaggaagaggaacaaattgagc

SEQ ID NO: 566 - DNA, 399 bp, Homo sapiens
accacttttatcacaatggccttgcaaaggccaagagaagacgcagcctacaccacaagcagcagctggagagagaccccagggtaaagatggctttgcagcaggaaggatttgaccgaaaaaagcgaggttacagagacatcaatgagatcgacatcaacatgaacgatcctctttttacaaagcagtggtatctgatcaatactgggcaagctgatggcactcctggccttgatttgaatgtggctgaagcctgggagctgggatacacagggaaaggtgttaccattggaattatggatgatgggattgactatctccacccggacctggcctccaactataatgccgaagcaagttacgacttcagcagcaacgacccctatccttaccctcggt

SEQ ID NO: 567 - DNA, 318 bp, Homo sapiens
attaggtgaggtcaattgatactgcttaaaaggcctggtccgtagaagatgcccaataaacattactgctttccccctcaccctactgcctgaaaaaatattacacctgtgagactgactttgagaaccagtgtgggtggggagttgtgcatataaactatttaatgagtaccaaacacaaaagtcaagcttgtaaaatatcaggccttgccccagaaagacaaataccacatgatctcactgatatgtagaatcttaaaaagtcaaactcagaagcagagagtagaatgatggttatcaagggctgggggagggagg

SEQ ID NO: 568 - DNA, 285 bp, Homo sapiens
accaatttcttccctactaggagtgtttaagaatgcccgtttgcccagcacccagtatagatcagtacgggtgatggaattgctaggtgcctgcctgaaacgtggagcgaggacagaggcggagctggggagggagggcggtgggaaaggcggatgtgcagcgctagttcttgttaaggatgcttttcaggcttctctccacggcttcgtccagctcttcctccagctcctctttcttggacatggccaacttggactggtaatcccgcaccacctggtcgatgt

SEQ ID NO: 569 - DNA, 477 bp, Homo sapiens
acatttagggctatcttaagaaatatgaatactttggcttccattattacattagatgaaaaaatcaattcaaataagagttgtcatatcctgctatgattaacaaaaaaacaagtagaaaaataagagagtgtatttaaaaaaaataaagataatcaaatgctttttgaaagacctgttctcttcactgccacacatattcatacaaatgacttagtaatctaatatgagaagtggtccttcacttatattaggaacttggtaaatatttgttgaatgaataaactatctatggatatgaatttactactttaatttgtgctttttttgaaaaaaagttttcaagtaagagcaatagtaaacatactgagttcacattttgctcagatcataagcctataaaacagtgattgttacaaacaccacccatcatagcacaaatcaatgtgcatttctgaagctagtaagaaaagttct

SEQ ID NO: 570 - DNA, 328 bp, Homo sapiens
  misc_feature 26, 30, 68, 86, 95, 192, 259, 289, 300, 323, 325: n = A,T,C or G
actctcacctaaagcctaacatgatncatnttttttttccaggaaacagaaaatgtctttggtctggnattaatatcaaaagaatntaactttanaactgatcccaataagcatggcccttacacagttcatgaccaatatttagttatatgaaaatggttcattctcttctagaatctaatccagtgcagncatctggtgaaagactggaagctcagaagacttttcaaaagcttctcactgaaatggtaatttggtnacacgggataaacagaattttgcataaatngcagaccttantcactgaataccccattaaacanancct

SEQ ID NO: 571 - DNA, 456 bp, Homo sapiens
acgagctgagattgccagcaaagagaaagaggaagaggaactgatggaaaagcctcagaaagaaaccaagaaagatgaggatcctgaaaataaaattgaatttaaaacacgtctgggccgcaatgtttaccgaatgctttttaagagcaaagcatatgagcggaatgagttgttcctgccgggccgcatggcctatgtggtagacctggatgatgagtatgctgacacagatatccccaccactcttatccgcagcaaggctgattgccccaccatggaggcccagaccacactgaccacaaatgacattgtcattagcaagctgacccagatcctttcatacctgaggcagggaacccgtaacaagaagcttaagaagaaggataaagggaagctggaagagaagaaacctcctgaggctgacatgaatatttttgaagacattggggattacgt

SEQ ID NO: 572 - DNA, 496 bp, Homo sapiens
actattgacccagcgatgggggcttcgacatgggctttagggagacagaagcatcacaagtattaaagttggttttagcaaggattaggattactacaattatttttactataataattatttttcttctatggaactcagaatcctggctacatttgaggacaggaatatgttgagcctgattttcctggtgtgtgtaaaatatttcctaggaataaattaggcactttttagaagcaatgttaaatcattcaggttttattttctgccctgaagcagaaatttaaaaaatgatattgggacctggaaggtttaatatagttcacagtgcctgaattacacctgctccgaaaactagctttgtatttcttatgactttgtataagaactgttcatctttggatcttgagcaccttacagataaaactttttatggcatctctttcatggacagtgattgatcttttcacaatgtatgtagcctctagaattttgt

SEQ ID NO: 573 - DNA, 461 bp, Homo sapiens
acatgggcacttgtcatatctctgtagatttttgtgtatttaaactatttcacaattttttaaagtattaattttaaaaagcttgtgtttggagatgtgagtattcttccctccttttttcaacaaactagggcttagaaaagtgcttgtatcttaatgcagtatgcaggtttccagggaaaatgtgtaaatgtctttatacccttcgatgctgctgcccaccagtgatgtaaatcacaaagcataactcttgttttgttctgttgagcagcatgagatactttgatagagcagccttatttgtggaagcttgcctcaagtatggagcatttgaagtcactgagggcacagagaaactcatcactgctatatatgcagattatgcccggagtttgaagaacctcggttttaagcagggagcagttctctttgcttcaaaagccggagcagctggcaaagac

SEQ ID NO: 574 - DNA, 258 bp, Homo sapiens
attaatagcaacctgttttaatgaataaagtcactcagagtccttcagcacttcctaagtagaggccagaatctgtagggcttcttttccccccaattgtgtagctcctagactccaagcactatataggcccctgtatagaaatgctcactaatgaagagggagggctagaagcttgtctgcattcaaagatcactggtgagtcattcagcaagaaaaggccccttaccaggaatagtcacagttccgtggcattgt

SEQ ID NO: 575 - DNA, 249 bp, Homo sapiens
acaagtggttttagtgaagaagtcttatattacacctcaggctgtgctccttctatgccagcaagccctgtattaaccaaggctggaattatttggttatccttacaatggagtaagccctcaggaacaccatcagatgaaggaatttcttacattttagagatggaggaagaaacttcaggatatggttttaagcctaaatatgatggagaagatcttgcttacacagtgaaaaatctcagacgtagt

SEQ ID NO: 576 - DNA, 515 bp, Homo sapiens
acaagtgggagagataaaggtttgtgaggggaaaaagggaagtatttggggagcttggtcagagaaggatatgggagtttagagaatgctaaaaggagttaattgacagggagagcatgaggctatcttgtaggtgcactgaacatggaatacctcttttgttggcttagtgggagaccagttctgcagatacttggatgagaaagccttttcatactgtggagagaaagataagtagccctatgagacttcaaggccccaaacccaggaaatgaagactaggcacaattctttagatttgaagaccaaaggcctgaccaaccatgtaggctttaagtcactatgacaagggtgtaatttgtttggtctagatgtgtgctgtccagcatggagccgggagccacatggagctgttgagcacctgaaatatgactagttcaaattgaggtgctttgtaaatatgaaatatgctgaatttttaagtttttttcttttcttttttttttgagatagga

SEQ ID NO: 577 - DNA, 256 bp, Homo sapiens
acacaggatgtgatcaacaaagttctattttacaggagtatgatcctgtcgataccttgccgtaggttatgtaacatgattggagcgcaaccagctgttctcttgcacagatcgagagtgaggggtattttgtgacattacacagcatcaggagcctggtgcctcatcaggtaactgaagagctcagtgtggtaggctggcaagtcacccttcccgagacagcccaccttcaggcccgtgatgtgcgcaatcatgt

SEQ ID NO: 578 - DNA, 431 bp, Homo sapiens
  misc_feature 419: n = A,T,C or G
acacttgttgcatttataaggcttctctccagtgtgaatcagctgatgctgactcaggcgagagatccacctaaaagctttcccacactcatcacacttaaatggtttctctacagcgtgaattctctgatgtgcaacaaggcttggactgtctgaggcttttagaatttgagctttctccccagtatgcatcctttgatgctgggctagggtggagctctggctgaaggccttcccacactccttgcaagggtagggcctctccccagtgtgagttctctggtgtctaaccagctgcgactgctggctgaaggctttcccacactcacgacaaccatagggcctctctcctgtgtggattctctgatggtggatgaggcttgagctctgaccaaaagcttttccacattcctcacatntgtagggcttct

SEQ ID NO: 579 - DNA, 267 bp, Homo sapiens
actaaaaaaactggaggggaggccaggcacagtggctcacacctgtaatcccagcagcactttgggaggccaaggcgggtggatcacgaagtcaggagatcaagaccatcctggccaacatggtgaaacctcatctctactaaaaatacaaaaattagctgggcgtggtggcatgcgcctgtagtcccagctactcaggagactgaagcaggagaatcgcttgaacccgaggcggaggttgcagtgagctgagattctgctcactgt

SEQ ID NO: 580 - DNA, 366 bp, Homo sapiens
actatggggtaaaaggggtagggtttaaagatgtagacagttgggttttttaagggccctttttcaataactggaacactctataacaaaggatacttatttaaatagatgacattgactatttttgtttttattaaaaggaagcttacatgcctaccaatatttaatcttttatgattgcctttttataactttttatattctcagcagagtgctttaccaattgaagtaaaatgtggcaggctggagttattgaagcagagtggcagtcttcagtttgcagagtaggggtctgtcttttaaactctgagtgcaaacttcagagttcttgccttggctgcagtttttttccttcaagaatgcagt

SEQ ID NO: 581 - DNA, 469 bp, Homo sapiens
actataaatttccctctaagcactgctttcactgcatcctacaaatttataagctgtatcttaatttttatttagtttgagctatttttaaatttcaaatttctcttaaaacttcttctctgatctatgtgttatttagaagtgtatagtttattctacaagtattctgaagttttctagctttctgttattgatttctcatttaattctattgtggtctgatagcatattttgtatgatttctagtcttataatttgttaaagtgtgttttatgatccagaatgtagtctatcttgatgaatattttatgtgagcttgagaatggaattttgttttgaatgtaatagtttatagatgccaattagatccagtggaatgatggtgctgttcagttctgctatatccttactaattttctgcctgctggatctgtcaattactgttagatgggtgttgaagtctccatcc

SEQ ID NO: 582 - DNA, 405 bp, Homo sapiens
acctgacttagtgtttgggtccaggaggatggtggggggctccctgggcatgcctctgttctactgtggaagaggagatgccatgggaaagtaacagcacctagggtcctgttcaacatggacattaaggaaaggtctgcctgaaccccttctgcagtagctggcttccattgggtttgtggaagaactgagattttttccaaattcccaaaagaggagaagtaaaggtagttctaagtagtttattttgtgggctgtgagccaagtctaatcttgtggcttcttttccttgtccagcactggcttctctggactttgcgcacctccaggagaagaacccagaaaattgatcagttctaaaaaaccatgccccacgtgagttgctgtttctttccttcttgaagt

SEQ ID NO: 583 - DNA, 471 bp, Homo sapiens
acagtaatttgcctcataagcataggagcattgggaatgagagggaactgtgcccagtatactgttttttttcttcctccaataaaagtggtgtagtgccgaaagtgctaaaatatttagtgcggtattgctctgtgaattcaagttcaacagacttcactttggtcatgtttattaaaccaccagtgacatttaaaaatatatttttagcagtcgtaatgttagtcaccaagggaaggtggtggaatgtctatgtttttgattttactgtgagttaaaaaggcacatttctaccttctattgtttttaaattcaagaatagggaattagttcctggtgttgtttacgagtgtattctcgtgtcaacatacagggatttagacatttaactctctgtgccttgataagaatatcatttagagtgtagatacttttgcctttttaaaaagccattattttatgagacttagt

SEQ ID NO: 584 - DNA, 371 bp, Homo sapiens
gcagtaggctcctcgggctgcccctcggttgacaatggtctccaggatggtctctaccatgctatctggcctactgttttggctggcatctggatggactccagcatttgcttacagcccccggacccctgaccgggtctcagaagcagatatccagagactgcttcatggtgttatggagcaattgggcattgccaggccccgagtggaatatccagctcaccaggccatgaatcttgtgggcccccagagcattgaaggtggagctcatgaaggacttcagcatttgggtccttttggcaacatccccaacatcgtggcggagttgactggagacaacattcctaaggactttagtgaggatcaggggt

SEQ ID NO: 585 - DNA, 558 bp, Homo sapiens
accccccaacacacacaaattgggaatgaaatatgtaattatagccatctttatatgaaatatccaaacaacaaatatatttaataatataaagatagtgccaaaatcaacaaaagctaagaatactgaggcttaactgaccccgattcgtatgattttgaaataaaatgttcagactttctagctttatcttaatttgcctttgcttcactgctttatgtagttacaatgtaaatctaagagatgcttaaaacagattaaaataatattgttaaaaaacatttttcttatctgagaaaatacaatataatcatatctccctcaaaatactcctgataacattagaaagttctgaagtgtttaatcatatataatgccaccattatcacatgaattcagaactgttacctgaatatttaataaaaaattaagttccatgaggatcataggtctctaaaagctacaatttaaaaatataaaagcaatgagagcaatctggctttgcagatgaatactgggtaaactgagctataaaattatatatttaattctacccat

SEQ ID NO: 586 - DNA, 115 bp, Homo sapiens
actccacaaaacactacagacagtaacaaaataattcaataaatattaaaaactttcaatagaattataggacacttttttatcatatgtgagcatcaacaatgccacagccatt

SEQ ID NO: 587 - DNA, 332 bp, Homo sapiens
accaggttccccctgacattacaaaaatgcatgactaacaatataatttcaaattcaagataaagaatagtctgttaagttagaaggatgtccctttatcagaaacactgggagttgatgcatttatttttctttaaaacagttcatctttaaaagcatgattgctctgttttgctgacatgcatacttatcttaaaaagaaggaggtgggcaaagaaaaaatttaccctaagaatctaatagaatcagtttgtaggattttagattttatgatgaatatgtgacttaaagacatgtccaagttagttacatgggcttcttaaaaccactgt

SEQ ID NO: 588 - DNA, 454 bp, Homo sapiens
acaaaagggaagggcgattcacactttacaaggtgagaggggctctgattgtaaggaaagctcgggcaaggctagacttttgcacgtccttttgactgtcacaaaatcaaaacattacttttttaggattaaaaaaacactagtgagaactcaatcttgaataacatttagaaagaatctcgctatacttgagactagatgacaaataaaaccaagctatttttttctttttaaacattaactaggctgtataaagaacatttattccttcaaaagaaaaaaatttacttctggttgaaattacaatttacaatatacaacactatatgctacgaccataaaaggtgagaatatacactgaatgcacagggctggctaattctcttttcttaccaaaaaacgtgtttatgttgattcaaacttctccacatttacactacaggtatacaaatgt

SEQ ID NO: 589 - DNA, 523 bp, Homo sapiens
cagttatggaggtgtgattcaggatgaccatattccatttttaagaagaggtgttccagttctgcatctgataccgtctcctttccctgaagtctggcacaccatggatgacaatgaagaaaatttggatgaatcaaccattgacaatctaaacaaaatcctacaagtctttgtgttggaatatcttcatttgtaatactctgatttagtttaggataattggttctagaattgaattcaaaagtcaaggcatcatttaaaataatctgatttcagacaaatgctgtgtggaaacatctatcctatagatcatcctattcttatgtgtctttggttatcagatcaattacagaataattgtgttgtgatattgtgtcctaaattgctcattaatttttatttacagattgaaaaagagggaccgtgtaaagaaaatggaaaataaatatctttcaaagactcttttagataaacacgatgaggcaaaatcaggttcattcattcaacgatagtttctaacagt

SEQ ID NO: 590 - DNA, 561 bp, Homo sapiens
  misc_feature 516: n = A,T,C or G
acttttcttgtattttttaccatatcactgtaaagaagaggggaaacccagccagctactttttttcatcactttttattcataacttcagatttgtaaaactaatttccaaaatataagctgttttcattagccagttctataatatcttcctgtgatttatgtagaaaatgaacacaccccttttccatttaagaccctgctactgtgtgaagagatgatacttacaaggagtgtcattacctgtgagctgactgaatgttggtaggtgctccattacaatccaggaaagtctgtgttactgatatttgtgtggaaatctttatttcacttcaatttaaccattagatggtaaaattaagatgctacttgttggtaaaaattggtggactggtttcaatgggtaaatgtgttgtggcaaattaatgtgttggaatattgctctttgtgaatttgtgcttaagtcaatgaatgtgtagtatctccttctgacaagcattccctattgggattttnaagctatgtgcacagaatattagtctcttctacatgttttatttt

SEQ ID NO: 591 - DNA, 527 bp, Homo sapiens
acaaagattggtggcttttatatttttttaaaaatgctatactaagagaaaaaacaaaagaccacaacgatattccaaattataggttgagagaatgtgactatgaagaaagtattctaaccaactaaaaaaaatattgaaaccacttttgattgaagcaaaatgaataatgctagatttaaaaacagtgtgaaaccacactttggtctgtaaacatatttagctttgcttttcattcagatgtatacataaacttatttaaaatgtcatttaagtgaaccattccaaggcataataaaaaaagaggtagcaaatgaaaattaaagcatttattttggtagttcttcaataatgatgcgagaaactgaattccatccagtagaagcatctccttttgggtaatctgaacaagtgccaacccagatagcaacatccactaatccagcaccaattccttcacaaagtccttccacagaagaagtgcgatgaatattaattgttgaattcatttcagggcttccttggtc

SEQ ID NO: 592 - DNA, 422 bp, Homo sapiens
actatctggctgcagagactttcttaggtcccgtgttagaccccatggggtctcagcatgtggtcatgtggtaatgcattcctttcaaaggctttgggttgaactcaagttggaaatacctggaaaagaccaagcttctcctttgggtgtctgcggatcctattaaaaatattcgtgatgttttaagttctccaatacaagtttctccatgaaaacaagcatcagatacattacctctaagtatttattggaggggttccaacagcctcgtggacaggccttctcagcagctactgagtgccccctaggggtggggaggggccagtgcacatggaggcaaaccacagagcccttttgtggcctattattatgaagaactaaaatgtggccagtgaaccagtcagtgctcatcactacggggt

SEQ ID NO: 593 - DNA, 602 bp, Homo sapiens
  misc_feature 548: n = A,T,C or G
accaacttgccagactcttgtgctaccattttaacggattcttcaggatcaacatgaaaaattaagtttaaaggaaaactagtgtttttcaaaaattgcaaaattacttcgtatttttaaagctaaacaaggcatttttaaaaaaaatttaacataaacattcacaatgtgtccctcgaatggcatttgagaaaagggagcacaggggaagtctcttgcttttcctattcatggtgggcaggaagtgagacaaccaagctggactaaaggcaactcactgtgcccaaatggcagcctccatggagttaagtcagagccattgactgctatagaaagcattattacaacatatcagtatttgctattgggaatttatattttttgagaaaatatttacctatgcaatgtttgattgaaaatcactggagttttcctgtaaaacttggtctgcaaaaggattttgtagggtaagactataataccaaaatcaccattctttagaccaattgaaaaaaaataaataaaaccaatcctaggttaactgactnataaatacgatcctgaacccaaccaccattctactatttcaattctccctctgt

SEQ ID NO: 594 - DNA, 374 bp, Homo sapiens
acccggcacacccagacccacaccaaggcccaggcaaatggacatccatgcctgcacttgcgtgccggtccctgtgtaagccctctctggacccactgcaggaaacaagcccaaacctgtggtgtccaaagagaaactagtcagaaaaccaggccaaaaagataccctgtgacctcccacacctgcacacacacccagagctagcatagaggctattcccagcagccccagagtcccagtggcggtgcctgcttctctctttccagattgggatctgcggccgcaccggcagtgggaagtcctccttctctcttgccttcttccgcatggtggacacgttcgaaggtgagttgtaaggcgggcaccccacgtgt

SEQ ID NO: 595 - DNA, 493 bp, Homo sapiens
actctgtcccctcatgactttttagacacagggactaggacatcgaccaccctctgcccctcctgcagtcagaacccgagtagtgcaagaacggccacccggttttgccagcgttcagcgtctgcccatggacccataaggcacattagcgttgggggtctcttttcagcagcctcacagacattcccgtcctttctggttggtgttgactgtgtttcagcatcactctaccctcccatgtccttagcattgctgtgcgtgtttccaggcacttaggacacccttccccacgttgccatcttactgacagttcaaatgactctccttttttgttcgttagtaacaatcttcatttgacaccttaatacatttctgactgttcttaaaacagtggggatgcctatattttccttgagtttttgtgactgactttggctatatatacctttctggggttttgtttgttttttatttttattttgattaccgaggg

SEQ ID NO: 596 - DNA, 377 bp, Homo sapiens
cggccgaggtacaaaacaggaatgaaaacatacatatactgtcttgtctttatgtcgtattaatgccaaagatattgtcagggattattttaaagaagcccttactcatgatggctatttttaaaaatggcacaggacagtaacaggctgaaaagaaaacacctggttgaggggacaaattaagtaaatacaagacagcttaaccaaggaagtcagcgaatctccacaaatgaggcttttaataatactttactggtaagacattttagttgggtttttttttgatggctgaataacatcctaaagaagtattttaaatataatcttttaattttacaatgtagaaaacttctcacagtaagtagagagcttagagt

SEQ ID NO: 597 - DNA, 486 bp, Homo sapiens
actgtgatgaatagaagtggcaggaagagatgttgctatcttattcctgatcctagaggaaaagattttagtttttcaccattcagtatgatgttagctgtgagcttttcatgtataatctttatttactgaggagtttccatatattactaattctttgagtgtttttattacaaaaggtgttcatctggctctggaaccagataaatgttgacctgatagagtggattggaatgtccccttctggtttttgaacatttttggaatattttacaaagggctggcattaattcttcttgaaatgtttggtaaaattttccagtgaagttatctggacctggaattttcttttttggggggtttttgattactggttgaatcttcttactagttacaggtctctttggattttttatttctccatgatgcagtatggtggtttgtgtttctaggaatttataaatttattctaggttgcccagttct

SEQ ID NO: 598 - DNA, 410 bp, Homo sapiens
actctgcctcacaggacttaaggctgctaagtggaaacaaagttctgttgacaaggagatggagagaagcagcgaactatgtctgccaaagagggatgaagaaaatagtggacgttcagtggaagttcctctcagtgtgaggaacttcatattcacagggcccactgccagcagagagctcatttccaaatcctgtgcagccccaaaagcccttaggcacgtccttgcttcagaaagcagtcagtagcctggtttttctaggtttttctaaagaaaaactaggaaaaagtagcccttgcatttggaaaagaaaaaagtcattgcagtcatagagtaattctaaacaaccactttttcagaagtgatgacatgtggggttcctgttcattacattatgacgagacccaggt

SEQ ID NO: 599 - DNA, 316 bp, Homo sapiens
actgtccatccttcaggcatccctaaagctcactctgaagatgttagagacaaacacaaactcttcgagttaaagttgatcctgacactgacatgaaggcaagccttgatttcgtatgaacgttgctgaagtggtaattgaggaaaacagttccccagattgttaagagttcactgaagatattgacacaattttaaaaaatcagtaaaggaatgtatataatattgctctcgtgttttacagtaagatttgttgctctcagactgtgtaaaacaaaatttattcatgttttctgcatattaaaaaatcttattgt

SEQ ID NO: 600 - DNA, 222 bp, Homo sapiens
accttgctctgagcctcccagctcagaaccctccagcacctcatggctcagcaccaaggcccggggttggtcagaactcttaccatgagcctctgacctggctggagatggaggtatgttctgtggcagacacgtcaggacagtcctccagccctctgctcctgatggttctgtgacattgggtctcttgagggcagtggagtgtcacacagctaataaagt

SEQ ID NO: 601 - DNA, 363 bp, Homo sapiens
  misc_feature 165: n = A,T,C or G
acaggcaaaggaaatcaggagtagactgtcttgttatattgggtgtatgtcacttctggttcctttttccttgcctctggaagctggttgggctctagagcagccttggctggttcagaggggtcagattgagttcaatactgactggcctttgagactccaggntttcataccatcctaggcccacaaaggtatattcagaatggacctggacattcagactctatggcagcaatttgacccaacacaagatcagcctctggggtgggaataggtattttgaggcagcctatagcatctgatcccctttcaccttccctaaggaatctctttttcccaaaccctgtcaacaactcccaagtc

SEQ ID NO: 602 - DNA, 532 bp, Homo sapiens
  misc_feature 525: n = A,T,C or G
acattgattactcaaggctgtataacaggttaccctaaaacttagttgtttaaagcaacaaacatatattgcctcgtagtttctgtaggtctggactctggttatagttacctgggtgcctttggttcagtgtctctaagaatgctgtgatcaagatgttggctaggactgtttctggtctgaaggcttgatttgggaaggatctggttctaagagctctctcaagattgttgacaggactgagttccttgggagctatgttggattgaagacttcagttccttgctggctagagactggaggcttctctcatttctttgctacttggcctctgtccattcacaagacagctgatttctttcaaagtgaaagagaaagcatgcaagctcaagtctaagacagaagctacttttttttttttttttagtaatctccgaagtgacatcccatcacctgtatcatattctgttccttagaagctagggactaaatccaagcatactgcaggataagaggatgcaaggntgtgagt

SEQ ID NO: 603 - DNA, 510 bp, Homo sapiens
  misc_feature 484, 497: n = A,T,C or G
actgctgcagcgagccgggcagctacttcccctacaagcacagctacatgtggagcctcaggtcaaacttgtcagtgtcctaatcccagagaaagagcagaagcctaaaggcaagccaggaagataatgaagaaaaagatcattacttttcaatgacgtatgttccaaatacagcattggtgccttgattggactaggaattgctgcccttgttttactcgcctttgtcatcagtgtctgtgtcctttgctatttatttctgtatacgaaacctcaaagattagacactggccttaagcttcaacacttagaggcttcttccactcaagaaggcaagtcaaatggaaaaaccaaagccctcaattcaaatgcagcatcaaatgcaacaaatgaaacatactatgaagctgatgatataattcaagaaaaaacaatggatgcaacacaaatccacattgcttattaactaaaaattctgtgtttnaaatgcttactgnagagatgggacaa

SEQ ID NO: 604 - DNA, 337 bp, Homo sapiens
  misc_feature 206, 290, 296: n = A,T,C or G
atttttagtagagacggggtttcaccgttttagccgggatggtctcgatctcctgacctcgtgatccgcccgcctcagcactttcggaggccgaggtgggaggattgcttgaggccatgagttcaagaccagcctgggcaacacagcaagatcctgtctttgtaaaaaaactaaccaaacaggaaaaactgggagattttctgcanaaattgagttccagcctctctcgaacctgggaagacctggcaggagggggctgggctctcggctacagacttctccccaccccngtaganctgaacgccaaccatcctgacccgccagtgctcttggtctc

SEQ ID NO: 605 - DNA, 325 bp, Homo sapiens
acatcctgacaaggagctaggggtcatggtgggagtggaagtgattaggaagcagtggtcagagtggggagaaacataactccagttgcatgtgtgacagaacagactgttcattgcagagccgaacaagttagggcggaagaatagtcattttctttaatttttgcacatgtgacatattttccttgaagtgtaacatatatagaaagtgaatgaatcataagcatggctcgaatcacttttacaaaatgaatacttttttgttatcagcaacaagattaagaaacagaacattaacagcacttggaagtgctccctcccaggt

SEQ ID NO: 606 - DNA, 470 bp, Homo sapiens
cggccgaggtacagttttacacagaatgctaagagcacttttcttcatattttacagaagggcttgaaacatacagactattcgtaatcatacaatagcacatccaaatctaactcctaaatagatgatgcattataatttgtttagaatttaaaggcttaatggcaataatcaggggaggaagaagagtatgtttattttacataactgacggaaaaataaattcaacaaatagtaaatagaatttaatatggtctcatgcgccctgaaggaggtggtgcccgatttggaggggtaattgctatgtccaagtaatctcctatctggaacttctgcgactgcagggtcatggaatcatcagtcccctttctgccagacatggtgctgccaatctccttaactcgatagccaggtcttttaacatctgtaaaaacgattgcaaaattgaagtgagtgcccttctttctagc

SEQ ID NO: 607 - DNA, 505 bp, Homo sapiens
  misc_feature 397: n = A,T,C or G
accttttcttcccatcaaaaatgcattaacaagatcatgcttatagttagtcagcacaagaaaaaaacgacaatttatactgaactatttaagtcttgcagtagagtgctcacaactccgagctgtatctgttaaccttttcaatagcattcattatgtgacattgtcaccaattacagtaaaagaacttcactaatttttgaaagctagaattactcaaaaaattctgcattgtaaataataccaggaatattgcatttaagcctaggatggcaaaattacttaaatcttttctatacttttttgtgtaatataggtaggaaaatgaatactatataagagaatgaaatatatcaagttcttatatttttacctaagaggctatttattttaaggnaagttgattaatatttaaatgattaaaaaataaatcaatgttaagtattaactgcacaaaatctaaaaaaaagaccacattacatcatactacattatatagatagat

SEQ ID NO: 608 - DNA, 564 bp, Homo sapiens
  misc_feature 560: n = A,T,C or G
acagctcacaacctgtggtggtgtctttggacaagtaacttctatgcctcaatttcctcatcttagaatgggagtaatattagtaactacgtcgtgggcctattgtggggactgagttaacatctgtaaagtgcttagaacagtgtctaatatatagttaattctcaatacacgtaagtcgttttcattataattatgttcctctatgtagtagaaagggggtcttgtcttcaccatatcggtagtgaggactccctcagctctaagtcatttctggcaggtgagagggtgggacagctctagcagaatatgggtttaaaggggaaagcaactaataggagatgcagtggggtaactggaaaagaacagttttaaggaagaggtggagctcagaatctgagtgacccaaaggacagcttttgacttcaagaagtccctcttgtttgttggcttgcttccagcttatgttctttacatctgctggctcagcgcattgggcagctttcttcttttttctcagcgacaatcttttatcctatctgaccaggatttctctgctncccg

SEQ ID NO: 609 - DNA, 364 bp, Homo sapiens
atattacactcctatgtttgttttcaagaaagcttcattgaatcattcactaatcctaggataattaaccttttacctggattcaaggattgaggatttgatggaaagctggttgcataaaacacatgagcaaaatggatatagtgggttaagtttgctcgaaaatggatagtgtgttaagtttgctcttatttttaagtctggattcccagaggacatttaagtttgagaaataactcctagttgtggtatgttgctttcatcgtctgatgcctttgaagcacactgctttaatgcacatttactttagatttagatctcaagaaggagctctagtccttggttaggcatccaaattgtaggt

SEQ ID NO: 610 - DNA, 333 bp, Homo sapiens
tgttccgcttcaacaacattaacttggatccacttacagaaacttatgggattcctttctacctacaatacctcgcccactggccagagtatttcattgttgcagaggcacctggtggagaattaatgggttatattatgggtaaagcagaaggctcagtagctagggaagaatggcacgggcacgtcacagctctgtctgttgccccagaatttcgacgccttggtttggctgctaaacttatggagttactagaggagatttcagaaagaaagggtggattttttgtggatctctttgtaagagtatctaaccaagttgcagttaacatgt

SEQ ID NO: 611 - DNA, 195 bp, Homo sapiens
acatgcagctcatcccgcagcagctgctgaccaccctagtgccgctgttccggaactcgcgcctggtccagttccacttcaccaaggacctggagacactgaagagcctgtgccggatcatggacaatggcttcgccggctgcgtgcacttttcctacaaagcatcgtgtgagatccgcgtgcttatgctcctgt

SEQ ID NO: 612 - DNA, 461 bp, Homo sapiens
acccaggggacaatgccacaccagagcagatggcccagtatgcagctgatctccgtagatacatcaacatgctgaccaggcctaggtatgggaaaagacacaaagaggacacgctggccttctcggagtgggggtccccgcatgctgctgtccccagggagctcagcccgctggacttataatgccaccttctgtctcctacgactccatgagcagcgccagcccagctctcccctctgcacccttggctctggccaaagcttactccctgctcccacacaggctcaataaagcaagtcaaagccaaaaaaaaaaaaaaaaaaaaagctacctgcccgggcaggtacttatttcagagtaagtttttcatttttttaggttgtagggagtttttttcctactgagtgttattagattattttaatgttactattgttattaggcaattaaaatgtttttaa

SEQ ID NO: 613 - DNA, 475 bp, Homo sapiens
acaaattatacttgtttttatagactagaattactcttttttttcttttcaggcagagtctcgctctgtcacccaggctggagtgcagtggcatgatctgtgctcactacatctgcctcccgggttcaagtgattcttgtgtctcagcctcctaagtagctgggatcgcatgtgtgtgccacaatgtgtagctaattttttgtatttttagtagagataggattttgctaagctggccaggttggtttcaaactcctggtctcaagtgatccgcccaccttggcctcccaaagtgctgggattacaggcgtgagccaccaaacctggccttagaattactcttagaacagtggaatgcccacacatccaagacaggcaagttcatggagactaagggaacagtggtatcatgtctcccttctcccttgtgcttactacaagaatggcaggcagaattccctacttatttaaatat

SEQ ID NO: 614 - DNA, 252 bp, Homo sapiens
  misc_feature 162, 236, 240: n = A,T,C or G
gagacagacagaagaaaacaccagaggcaagaactgtagaaggccaggtttctgagaatgaattgagcggggtgtcctgagcagtttggaaaaggagtttttgatggtatggtgtaggtgagggctggctgcgtaggaaggactgaggttggaacggacatngggaaagctgaggggcagtgaggtttactacatgggaaaaggactcttgaaacgagaatcagtgttgatgtcanggtnaactttgtgggt

SEQ ID NO: 615 - DNA, 438 bp, Homo sapiens
accccaaaagagggaccccagctgattgccacttgtccatgagcttgggaggtaagaggagccttaaccaagaggcttgtccactccttgcttctgagaaggcccccgaaatccctctacctggagtggaggaagcgtctaggctgtgtgaagagtccgtgggtcctcagcttcccagtcctttcttggatatggggaagtcctggggtgtgacttggactcctcttgctgctgtagagcctctcctgggtctcctgcctggagccgccttggctccacagccttgcctcagacctgtgcagaggaacccagccacataggagcccacttgctgttggatgatgggagaggcaaaggccaaaatttccaggccccgggatggagtggtctaaatctctcctggtcagggatgttgcagtctggcaggggaaaggccag

SEQ ID NO: 616 - DNA, 329 bp, Homo sapiens
acgtcctccaaaagacagctgaaagtggagagattttgatttggtgctgttagaggtggcaattaagagcataagcaccagggagatggtttaatggtaactgccttttttgatgtcaggctggagctccaactgggaacttgcgttacatgcaagattgattggatagggaacactccctgacaaagagctacataattagaaatggatcaagttacagggaggataaggggaaggcttcacattcataatagagctcaagacattacaaattcatgctgacagggctgtggcattgccagacagaggctataagtggaactacaagt

SEQ ID NO: 617 - DNA, 265 bp, Homo sapiens
acatctgtcactccactgaaagggacctagtcactttaaagaggccttttatctcagcacgagatatccaagcgtgaatgctaaggcttgatgtttccattaggatttagcattcgagatttcagattttatttatagtcattgatgtgttttgctgtattataacacatttaaagggaaattttattatggtttttacatgtagtcatttcataaaaatatccagataggtaaatggaagaaaatagtagattttagtcatggt

SEQ ID NO: 618 - DNA, 473 bp, Homo sapiens
accaaattttaaagcagcagtaacttaatttttatatcagtgtttttgttttgcacaaactaaatgcagtggtaggtgggtttatgagtatattaattgcctttatccatttgtgaagttaagttgatgagggcaaggtttttgtttgtttaatttgtatatgtctaaaggtatttggaactttttacaggaattaaacatatatgcaaatttgtatataaaaatagcatggccatcatttgaatgcttgtaaatgaaaggattatcttttttgagatctatatataaatagaaatagaaaatccagctggactgattaggattcttttttaattcatttgtgtataacatttttattacaattacacatcagttttgacacagtcatagcaacattaatattttcccatgatgcagatcctttttgtaatgggcttgttctttgagatctctgtaaagaaccctgtgaacta

SEQ ID NO: 619 - DNA, 456 bp, Homo sapiens
acttttcttgtattttttcccctcttctttacagtgatatggtaaagaagaggggaaacccagccagctactttttttcatcactttttattcataacttcagatttgtaaaactaatttccaaaatataagctgttttcattagccagttctataatatcttcctgtgatttatgtagaaaatgaacacaccccttttccatttaagaccctgctactgtgtgaagagatgatacttacaaggagtgtcattacctgtgagctgactgaatgttggtaggtgctccattacaatccaggaaagtctgtgttactgatatttgtgtggaaatctttatttcacttcaatttaaccattagatggtaaaattaagatgctacttgttggtaaaaattggtggactggtttcaatgggtaaatgtgttgtggcaaattaatgtgttggaatattgctc

SEQ ID NO: 620 - DNA, 555 bp, Homo sapiens
  misc_feature 519: n = A,T,C or G
actcccagtagcaccaccacctaagccaagatcactgacagcagaagaagtgaaacgactagaagaacaagaagaagatacatttagagaactgaggattttcttaagaaatgttacacataggcttgctattgacaagcgattccgagtgtttactaagcctgttgaccctgatgaggttcctgattatgtcactgtaataaagcaaccaatggacctttcatctgtaatcagtaaaattgatctacacaagtatctgactgtgaaagactatttgagagatattgatctaatctgtagtaatgccttagaatacaatccagatagagatcctggagatcgtcttattaggcatagagcctgtgctttaagagatactgcctatgccataattaaagaagaacttgatgaagactttgagcagctctgtgaagaaattcaggaatctagaaagaaaagaggttgtagctcctccaaatatgccccgtcttactaccatgtgatgccaaagcaaaattncactcttgttggtgataaagatcagacccagagcag

SEQ ID NO: 621 - DNA, 479 bp, Homo sapiens
actaccagatcctacacttaaagctcagcattattggtataaaaacttaagacggcattagaattcttaagaaaaggtgtaaaatttaaaaagatgtgcaaacaacaaagaatgcccgaccctgaaccagacctaaagcaccttccagttcctccacacatcatgccccaacaccatccagcccaatcggacaccaggacagtgagggacgggtggctgttcagtgggcaacagatctggaaggaaagattttcaaaaaaaaaaaagtgtctgccaaatttgaaaaattaaaagttatctgtctagcagaaaaatcaaatgggtaaattagcactttagaccgataacagataataaaatgacaaatcagaatgaacaaaaaatcattaaccttttgatttcagtattttcaagagattttatcagaatactctaaatgacaaaatgactcatggtttcttatgtttgctaaaaagcaa

SEQ ID NO: 622 - DNA, 449 bp, Homo sapiens
  misc_feature 85, 344, 435: n = A,T,C or G
acccagaccctccaaatccctgtcctgttggaaaaacagatgatggatgtctagaaaacacccctgacactgcagagttcagtcnagagttccagttgcaccagcatctctttgatccggaacatgactatccaggcttgggcaagtggaacaagaaactcctttacgagaagatgaagggaggagagagacgaaagcggaggagtgtcaatccatatctacaaggacagagactggataatgttattgcaaagaagtctgtcccccatttttcagatgaggataaggatccagagtaaagagaagatgctagacgaaaacccacattacctgttaggcctcancatggcttatgtgcacgtgtaaatggagtccctgtgaatgacagcatgtttcttacatagataattatggatacaaagcagctgtatgtanatagtgtattgtcc

SEQ ID NO: 623 - DNA, 245 bp, Homo sapiens
actctgttcccgctgccacatttggaacagtatgacggctgcagcagaggccaaaaactaagtgatcagccccagagagtcgatgggggacactgacaaaccaatcacaaagttggtgccattagctcttagggaggagaggtggggcctgggcaaggacagcagctggagggtgaaacgcagacctggctctcagtagcggtagtgatccggcttgaagggggcatcacaggacatgcccaggt

SEQ ID NO: 624 - DNA, 436 bp, Homo sapiens
ctcgctttaagaaaaccacctgtctcttctcattataacagttaggtggttttcttaaagcgcgaatacaatttcatcatctcccctcctgggcaaagttaccctctcccccatcctgacagtggtctggccctctgacctcactccctccaccctctgcttccacagggcccagctgccctggacctgccacccttctcttcctctgcctggaaggccatatatggctgcctcctgcatccgagtggtctcggctgactgttctctccttgaagatgtcctctctgaaaactatatctaggctgaagctccctatttttctctgtttttgagtcctcctgtttgctttttgtcactattaccagtttgagggcatacacttatctgtgtgttgacttgtttattgtccatcatcactagactggaggtgccactg

SEQ ID NO: 625 - DNA, 287 bp, Homo sapiens
actattgacccagcgatgggggcttcgacatgggctttagggagtcataagtggagtccgtaaagaggtatctttactataaaagctattgtgtaagctagtcatattaagttgttagctcaggagtttgatagttcttgggcagtgagagtgagtagtagaatgtttagtgagcctagggtgttgtgagtgtaaattagtgcgatgagtaggggaagggagcctactagggtgtagaataggaagtatgtgcctgcgttcaggcgttctggctggttgcctcatcg

SEQ ID NO: 626 - DNA, 529 bp, Homo sapiens
  misc_feature 461: n = A,T,C or G
acttaaatatagatgagaaagatagatgtttgtcttcttcttttgatattgatattaaatgaaagatggaatgttttttatttaaaatcaatccctcgtattttcccccaaacacaaaagtaaatagcaatgtgaacaaaggctttctttaagtctgttattcagttcaaatatgtgttagaaaaaagatctattctgtgtataaaatataacaacaaaaaagggaattataaatagaaaaataaaacatgtagaagagactaatattctgtgcacatagctttaaaatcccaatagggaatgcttgtcagaaggagatactacacattcattgacttaagcacaaattcacaaagagcaatattccaacacattaatttgccacaacacatttacccattgaaaccagtccaccaatttttaccaacaagtagcatcttaattttaccatctaatggttnaattgaagtgaaataaagatttccacacaaatatcagtaacacagactttcctggattgtaatggagc

SEQ ID NO: 627 - DNA, 463 bp, Homo sapiens
  misc_feature 37, 69, 353, 359: n = A,T,C or G
tttgtacaagctttttttttttttttttttttttttngggaaagggtcttactcagttgtccaggccanagtatggtggcatgatggcggctcactgcacccttgacctcctggactcaagtgattctcctgcctcagcctcctgagtaactgggactacaggcatgcaccatcatgcctggctaatttttgtatttttcttagggacagggttttgccatgttgcccaagctgatctcaaactcctgagctcaagagagctgccggtcttagcctcccaaagtgctgggattacaggtgtgagccaccacacccagccagaaatcagatcttaatagaataaaaactattanactgcncagaatgagtaaacattgttttgtgaaactctggtttcctttatcaatataggcatatgcatatatttcatatatgtgtgtcaggggagacaggcatgattttg

SEQ ID NO: 628 - DNA, 493 bp, Homo sapiens
  misc_feature 171, 172, 409, 410, 439, 443, 461, 487: n = A,T,C or G
acaggaaaaaatggacttgggatataagttaatggtgaatataggtgcacttgctgtattttgtggttaatgttttgaatgtatgcaaaatccacactcaataaagcacactgataaaatagatttccaataagactacaggctctgaaaaacaaactggctaagttggtnnagaacataggtagaaattatcgctgattagaaatatttacaaaaaatagctttaaattcatacgctgaagaataaaagaaatgtcttccaagtatacctgatgtcaataagatcccaaataaatcaaatgtaaacaccatctggatggatctgtgttacctagtgacatgcagcgctgcttcatggatagtgaaaacttggcatcccacctctagcataaaactttttctgtaactnnaggtttggggagaatgaaagtgatttaantatntatgcctatctgattttnaaaaaataaggatttccagcctctantatcac

SEQ ID NO: 629 - DNA, 324 bp, Homo sapiens
acgtatttagagagcccctgaaattgactctgttcctgaccctctgagccagtgctgcatttatagccttatcaaactgaagtagaacttgaagggcaagttggggggtgatctgtatgagctcatctaggctctcctgaagactgtttcccaaagtagtatttctgtataactgatatgccatggcttaggaggaagaatttgtttttcttattcaagcttgcattgatgtcctgtggggaaggcgcttcccgccgcggagcggacagaagccgccacgagcccggcaggaggttcctacttctccgaccacctctccagccg

SEQ ID NO: 630 - DNA, 414 bp, Homo sapiens
accagaagcaccagtttcctgtggcaaacagaattattcctgctgtatttgtaatttggtgccacgaggtagcccagatcccttcagctctgatggaagagcattgcttcagccgtaaatggacacctgcagaaaccttgcaccgatggatagtctccctcagctccgtgccatcgctgcaggggctgttatggacatcactgcagcccagtggctctctctcctggtctccaccatatgagttggcttctgtttctctcctgttttactttgcctttagctgtggtctttcaaaccaccatccctccttatcttcctctgctggttcctcagatcttcctctgatggcgctgcctccatgccatgccctctgccagttctatgtggtgaacagtgagctgtcctgccagctgt

SEQ ID NO: 631 - DNA, 309 bp, Homo sapiens
acttcttaaaacaaaagacttgaattcaacgttcaactaccaaagagagtaacagcagggcacatactcagggctcgaatgaaactgtaagcactagctggagcaaaacagtagacattggtttatattaatatatgtatatatgaccttattaactaaaactcttctcaaccagggccttccaaacaaattggtaacaacatgatttatgttgaaatatacacaagaaataacagtgtgttctttgggaatttaagaactcagactatccaaatttgaattcaggtctgtaggaagtgagaagcctgt

SEQ ID NO: 632 - DNA, 460 bp, Homo sapiens
  misc_feature 445: n = A,T,C or G
accacattccaagaaacttttgactattttgttcattaatgatgtgtctataaaaatgccttgcacatagttgttcaataaatattagttgagtgtattaataaaggataagacagaaaactttaaaactgagtagcaaaagacaagattgaaaaccaactagcaaaaaatatttagagcaaataatgcatgcctaatatgtaaagatcttacatatcaacatgtaggacattaacaccttttagtgagtgaagaaagtgaccgaaaagataaaatggctaataaacatgaaaaagttttaatcttgctagtcagaaggaaatgtaaatttggaaggtgagaaactgtttctcatctctcaattaggtgagggtaaaaagtaatttttcttggtcaacggtgtagcatgatgggagtgtaaattggtgcatacttaaaagtgtcnaatgttcctaccctg

SEQ ID NO: 633 - DNA, 210 bp, Homo sapiens
acgaccaacaagttgtgaaagcactaaaatgtcatgaatgcctatgaagcaactaaagattgaagcatttctttgcttctggctgtttttcttgggcacaatatctagttacatttcctgtaatgaagaatatatatatgtatgtatatatctatttcccttgtaataataacaagtgcagtggtaaagcaaccagaaagcaattcgagt

SEQ ID NO: 634 - DNA, 214 bp, Homo sapiens
acaaagcgatcagacacaaattcacgggcagaaatggcgagtctcgggcagtcaagaagaagtcctaatcttaggatggctagacagttaccaggagcaagtcttttctgaagataagaaacgcagacagtaaacactgaggggatctgaaagcggctggccaatgcaaaaatatcttgcacatttccgtcattgagatcaatactggcagagt

SEQ ID NO: 635 - DNA, 464 bp, Homo sapiens
acattgttccgaacaaggaactctaggaaggcaacgaggcctgtcagaaagacgaccaaaaccagcagctggtgcacaaagatgtccagcatttcccggccatgagtgtggttgtagaagataaaggcctccacaaataaggcatttgacaacattaacttggttaaggacacaggaagtgaactgatggtgaaacataagatatctgccgcacccaacagcccaaagaagaaatacatggtgaaatgatgccagcccaggagttgattccagtgaccttgtttatagtcatataacatcagatggggccctccaggaataaactgctccccagccatgccagttaaagccatgccaactattgtaattccctccaaaatttccaatcgatagaataatgttttggaaccaagatagcaggttcgcttttgctttttgcagatatacttcagaatactctttgt

SEQ ID NO: 636 - DNA, 435 bp, Homo sapiens
acttctcaaggacgaaacgaaaaagaaacaagttagtaaaatttacaagctgtatttataactttggatatgaattaaacagtaacgtttcttttccacagtgagaaaagctagaatgtggagtcctgtcatcagatgatgtgactacatggaatgaggactatagctgctctcttaaaaacctgcagccccctctctcagcccagacagttgaggtatttatgcaccatcataacattaacagcatctttgctctggaaagtgggggtttatgatttctagggtaaatcctcgcctttgggagtgtgaatgagacaagtgtatcagcaactgccaggaccaatcaatagatgtgcatggaacattctcttcatccccaaatcagaatgaacacagtcctttaaagtctgcactgcaggtgaaattcacatgact

SEQ ID NO: 637 - DNA, 435 bp, Homo sapiens
acagccttgtgccatggcacacagtcacagaaacatagcaagcccttgaaatcaggctttctgactttgtctaatctcctgctttagcaaagacatcaattctccctccttttatttaaatggtggctgggtccctgacaaggtatgttcctgcccacagggtttcacatttggcaaagctggagagatcctcaccaagcggctccgatacatggttttccgatccatgctcagacaggatgtgagttggtttgatgaccctaaaaacaccactggagcattgactaccaggctcgccaatgatgctgctcaagttaaaggggctataggttccaggcttgctgtaattacccagaatatagcaaatcttgggacaggaataattatatccttcatctatggttggcaactaacactgttactcttagcaattgt

SEQ ID NO: 638 - DNA, 434 bp, Homo sapiens
actaggactaatagcaacaaaatcaaggagttgcaaccataagaaggatgagtgtccaaggacaaccagttaagtattattttaagtattattttatcctcttcctttttaggagacaaagaccaatccatttgagttttgatattgatgcatttgaccctacactggctccagccacaggaactcctgttgtcgggggactaacctatcgagaaggcatgtatattgctgaggaaatacacaatacaggtatgtagcaaccaggtctgcagcctgttaactacataggtaaatatgctagagtctcttgcctgcaaaggatcttttctgctattccacatcattgcagggtttgtttttgcttaaacttttgtagctaaaaattatatggccatgctaataaaaaggatatagtcctttagagtcatgcttgg

SEQ ID NO: 639 - DNA, 439 bp, Homo sapiens
acgtgcctcagtgtctttggtgtgatatacacttagtaaatgttagttcagctctaacagactcatctgagattttgattctgtaactcccaagagttcagtatgctagcattttttttttttaacatgaggaagagttgggtaaggaagagctgtgttttaattgcattacggctcaactgctaactgttttgatatgttgaacaaagtccattgattcttcatggaggagtgcttgctggggagtgtgagtcagcacgtctgcgttattaacttgttcggaagctttttgtggcagattgattttaaaagcccccaaggaaacagaggattttatttaatagaaatattgtcagaatgacattgagatttgggtttagctttcaaatcactggatacaagttgaatcaggtcttttctctgacagatattggaaaca

SEQ ID NO: 640 - DNA, 499 bp, Homo sapiens
gtgctatggaaggaaatgctggtgactaaaataaggtttactctgaaagaggaggaattttattcaaagcattcaaacattttattcaagtgtttcaaaattcaaagcattgtattcaaagttgcagtgaaggcatcaacttatgtaaaaactcagaaggaaggctcctctgataaaaacacagctcctttattatgctgcttttcttgttcactttacacactaagtaaacacttattgtcaggtgcctagtcttgagtgaattgttagatgtgcactgaactcgggatgttggggattggagagagagaattgccaaagtaacagcaaaaatatctcttactttgctttgtttataaataaattagtagaaaaaagaaatgttagtatctcaattacaccaactgtgcaaatgaactttgataaaatagaaataatctacattggcctttgtgaaatctggggaagagctttaggattctagtagatggatactgaa

SEQ ID NO: 641 - DNA, 408 bp, Homo sapiens
actgaagtttctactaagaacacaccatgctcagagaacaaacttgacatccaggaaaagaagttgataaatcaagaaaaaaaaatgtttagaatcaggaacagatcatatattgaccgagattctgagtatctcttgcaagaaaatgaaccagatggaactttagaccaaaaattattggaagatttacaaaagaaaaaaaatgaccttcggtatattgaaatgcagcatttcagagaaaagctgccttcgtatggaatgcaaaaggaattggtaaatttaattgataaccatcaggtaacagtaataagtggtgaaactggttgtggcaaaaccactcaagttactcagttcattttggataactacattgaaagaggaaaaggatctgcttgcagaatagtttgt

SEQ ID NO: 642 - DNA, 472 bp, Homo sapiens
acaaaattacgtgaatcccatgcttgccttctgcagaggagatgttgttcattttctattggtaaagagagatgaatctggagcaatacatgttactaagcaaaagcatcttcacctatactatgacctcatcaactttacctggataaattcacgcacagttgtgctcttagacagcgtagagaagttgcatgtgattgatcggcaaacacaagaggaattggagacagtggagatctcagaagttcagctggtctacaatagcagccatttcaaatcactagccactggaggaaatgttagccaggcactggctttggttggagagaaggcttgttatcaatccatcagtagctatggtggtcagatcttttatttggggacaaaatctgtttatgtgatgatgctgaggagctggagagagagagtggatcatctcctgaaacaagattgtcttacagaagcgttggct

SEQ ID NO: 643 - DNA, 215 bp, Homo sapiens
acaggtgggggagctcttggtggcaggcagcaccccaggaggagtgggactcctgccgaggctgaccccaacttcaaggctgccaagttctgatgggagtgtcctcctccaggaacatctcccagccccggacgagcagagccctggaggagtgggactcctgccctgaggctgaccccagttttggggctgccgggttctgatgggagtgtcct

SEQ ID NO: 644 - DNA, 323 bp, Homo sapiens
acagttatacttttttatacacctgttcatttctacttaaattatggcacagattgatgcgcaccagtcttgaggaaacgatctccctattcccttaccctgttactcagccacgccgtgtgtaggcttagcctcaggtggcagatgtttgagaaaaggaattatgccaggaaggtgggaccgggttatggtcgggtttctattgggaatgctctttgtgcttttgggcatctgaatggaggctttacatagaaccttaggtagaactcccccaaatcgccatatttaaaaattattttcactctattcttgcttaaaactgt

SEQ ID NO: 645 - DNA, 383 bp, Homo sapiens
acacaaatgctaatcagtgatttggggccttttaatgtctttaacagcaatcttttatttatttatttatttatttttgagacggagtcttgctgtgtcaccaggctggagcagtggcgcgatctcgcctcactgcaacctccgcctcccaggttcaagctattctcctgcctcagcctcccaagtaactgggactgcaggcacatgccaccacatccagctaatttttgtatttttagtagagacggggtttcaccttgttggccaggatgatctcgatctcttgatctcgtgatctgcccgcattggcctcctgaagtgctgggattacaggcatgagccactgcgcccggcccaaatcttttattttttaacagccttag

SEQ ID NO: 646 - DNA, 337 bp, Homo sapiens
acacatgttaggaatagtgaaaagagaacaaagacaaccggcattttttgtcgttgttaccatgaggatacaccacggggaacatctccctaaacattttgtgtgatcattcttggagttcaatctgatagaccagtccagccttatctccacactactctaatggggaggggtggaaggaggggtagaggagaaggaagaaagaaaaagaaaggcacagtgactatacatcaatgccattaaaccgaattgcatctacacgggacagctcagcttatcaaagggtattctaaagacaatattcattccaagaaggtcacacatatcttacctcagt

SEQ ID NO: 647 - DNA, 473 bp, Homo sapiens
  misc_feature 440: n = A,T,C or G
acctgtcaaatcttgcattgaggttgcagttgaataagataaaagcttaggatgtcaaaaaataatatagagaaatattataagattttatgattattcttgaagtttttgatgcaaaaggaaaatatgctgaatagttcttccaaaaaatattatttccctcaatattttatttgtagccatgtaatttaaagagaacagaaaataactgcaatcaaaagtatggtttaatatcaatcagagtggcacaacagaattgataagatctttataacaatcaattggctgatattaaaatattgattttaattgatcttttcaattaaaatctttagggcctgtaactcataaaatcagcatccaccacaatatatggtcattattggtttgtaagcatagatcaccattgactcctacctggagagacatgtctatttctnaaaatccagtagtttctttgcattctcagtagt

SEQ ID NO: 648 - DNA, 429 bp, Homo sapiens
acagacgagaactagagaaataccgtgacctggatgaagatgaaatccttggagccctaacagaggaagagctgaggaccctggaaaatgagctggatgagctggaccctgataatgcactgctgcctgcaggcctgaggcagaaggatcagaccaccaaggcgcccacgggcccctttaaaagagaggagctcttggatcacttggaaaagcaagcaaaggagtttaaggaccgagaagatctggtcccctacacaggggaaaaacgaggaaaggtctgggttcctaagcagaagccactggatcctgtgctggaaagtgtgacgctggaaccggagctggaggaagccttggcaaatgcttcagatgcagaactctgtgacattgcagcgatcctgggcatgcacacgctcatgagtaaccagcagt

SEQ ID NO: 649 - DNA, 273 bp, Homo sapiens
acaggcagatgaaaccaggtcgctggggagtctgcttcatttcctctgagctgttatcttgtgtatggatatgtgtaaatgttatgactccttgataaaaaatttattatgtccattattcaagaaagatatctatgactgtgtttaatagtatatctaatggctgtggcattgttgatgctcacatatgataaaaaagtgtcctataattctattgaaagtttttaatatttattgaattattttgttactgtctgtagtgttttgtggagt

SEQ ID NO: 650 - DNA, 298 bp, Homo sapiens
  misc_feature 241, 259: n = A,T,C or G
ttttttttttagctgcaacagcactttattgggatctgagtctacagttcacatagggaggtgaagccgtgggagaagcaggggtaaaaaaaaaaaggggggggacttcaccccctagggacagctgcttccaaacctaacaaaaccccagggtaagtcctcgtgctgggcctcgagccagcaactctagtcaaatcccaaggcaccggtcagcatgtgggtcaaggggcccactatgggntacatacactcaagaggnttgaaagctctttagcttcagaatcagattgccttcccc

SEQ ID NO: 651 - DNA, 324 bp, Homo sapiens
aatgtaggcacttttattttcattgtgatttatatataaggtaatgtagggttatatttgggagtgactgcaagcatttttccatctgtgtgcaactaactgactctgttattgatcccttctcctgccctttcccaggtaatttaaattggtcatggtagatttttttcatagatttgaaaaacttttaggttgttaccaagtatgaagtataaatctggggaagaggttttatttacattttagggtgggtaagaaagccaccttgttacaaattttttaatttccaaaataatctatattaaatgagggtttctgatctgt

SEQ ID NO: 652 - DNA, 442 bp, Homo sapiens
acactttctggtagcacttaactgattgatttttcttcccaaataccagcagcacaaacttaaaatgaacaaactgaaatattcaagaaagtttttgtttttttttttttttaaaaaaaattaaggctaaccaagtgcatccattggtcaatggcacaattgatttcagcaactatttggaatatcctaattataggaaatgcccatctaagtgatatatttaaataatacaatcaattttttaaggtgaataaactatgatggtttctaaatagtgtaccctggttcatccttccaagagatgctggcatacttaaagactgggtagcagcagcaagaaggcctattcctgccgcagacaggtcacgcccatgaccctgtgagtccctactgagagatgactgctggaatgacttggacattgtagaactagctcttgtct

SEQ ID NO: 653 - DNA, 297 bp, Homo sapiens
acaaggatggttcaacatatgcaaatcaatcgatgtgacacatcatgtcaacagaaggataaaaaccatgtgattatttcagtcgatgctgaaaaggcatttgataaaattcaacatcctttcatgataaaatctcttaaaactgattatggaagaaacatacctcaacataataaaagccgtatatggcagacccacagctagtatcatactgaatggtgaaaaactgaaagtctttcctctaagatctggaacatgacaaggatgctcagtgtggccaccgttattcaacatagt

SEQ ID NO: 654 - DNA, 425 bp, Homo sapiens
acctgtcacacatcttgaaaaataaaacgataatagaactagtgactaattttcccttacagttcctgcttggtcccacccactgaagtagctcatcgtagtgcgggccgtattagaagcagtggggtactttgtgaagggagatgaaaggacgtttaaagtatatatattttgttgagaggaaagaagataaaactatgccagttttatatcaatagcttgtagaagctcagctcttcttggtcttggctagactgcctagattcccacagcagacaaggttgagaatccattgctggaatcttggtattgatgagttacagtgatggaacatgtgcttggccacaggcaggtccagtcactgcaaaagtgaccaagccagcaggtcacccttaacttcagaacaattattggtggtgaactgt

SEQ ID NO: 655 - DNA, 436 bp, Homo sapiens
  misc_feature 425: n = A,T,C or G
actttggcccgggtcacgcgtgggtcctctccgggctcgggagtagcatcctcaggagtagtgtagcgagcaaattctggaaagtagtcctcaatcttcgatttcccagcaaggactttctcagcgagcagatcttgcttgttgaggaacaggatcacagagatggtgcgcagccatctgttgttccagatgctcttgaagaggttcagagcctcctgcaggcggttggtctggttgtcctcccggatgaccatgttgtagctgctgctggccaccacgaagatgatggcagtcacatcgttgaagcactggatccacttgcggcgttcatcgcgctggccacccacgtcaaacatgtggaagttgactttgtccacctggaacttggtctcaaagattccagaagtcaggacacggcagcgaancaggtcctgat

SEQ ID NO: 656 - DNA, 450 bp, Homo sapiens
acacataagaaaaggattcagtaacacttgggcaagtaataaactgtagaactttaaaagtagtaaaggcatataccaagcatacgtgactccacacattgtcagaaaggcagtggactggctaacgagtttctgccaagtttcagaagcaaagaatacactaatgaaaagggtaaggcatccaagcagagtgtctgaattgatggaccatttttgtctaaaactaatttcaacatcttccaatatgcaagcaggcatttgttttacataaggtgaaacactttataagagaaaagaaaactcctataaagcttataagatcagaaaaaattaatactgaatttttataatcaatgcatggagcaatgatataaactgaccataacaattttgtgagaacaagtataaaactatccattactaccttaaagagttgaaagttaagccctc

SEQ ID NO: 657 - DNA, 333 bp, Homo sapiens
  misc_feature 119, 193, 321: n = A,T,C or G
actataagagaaaaactgaagcaggaaaacagtgagcagcgcctctttcttcttgcactcaaatgattacttcactcctgtcagctttatagtccaagcaaactctgcggggacagcanagggtggcaactggggtagagagatgaagagacctttatctggatctgtggaccacttcagatctccttgaatncccagcattgttatctttgtagttgaggtagttatgggggattcaaggtttaagactccattttctggccagtgcagaaaaatggcataaacagccgatccctttgaggtataccatacagatgttgngttcttttccca

SEQ ID NO: 658 - DNA, 274 bp, Homo sapiens
  misc_feature 24: n = A,T,C or G
acaggcagatgaaaccaggtcacntggggagtctgcttcatttcctctgagctgttatcttgtgtatggatatgtgtaaatgttatgactccttgataaaaaatttattatgtccattattcaagaaagatatctatgactgtgtttaatagtatatctaatggctgtggcattgttgatgctcacatatgataaaaaagtgtcctataattctattgaaagtttttaatatttattgaattattttgttactgtctgtagtgttttgtggagt

SEQ ID NO: 659 - DNA, 142 bp, Homo sapiens
acccactattattgggtttgttttatgccattattgattcttgatattcaagcatttacaatgtagcatatttgattttcttttttctttctttttttggcatcattaacatttcatttgaaatgcatattgttcttgaagt

SEQ ID NO: 660 - DNA, 279 bp, Homo sapiens
acttgtttgcaccaaacctaacttttgtgcattttaagtgtcagggaaggttaggatcacttcaccatacacagacacatgggaatgtagtccactcagttaatattatctggtgcacagagcagataagaggctagacatctggaaagattcttcaaacaagaacctgattaaaaaatcttcaaggtaaaaatgtaatttagtctatttgaaagcaaaattgttagtttaattaacttccacatacatagtgtgggctttcaatctacaaattataaa

SEQ ID NO: 661 - DNA, 516 bp, Homo sapiens
accacaaaccatagtaacttacacagggggaaaagttactgaaataaaaatgttttatattcatgcctcaaaatgtccctcagggatttttgtgtgtataatgaaaagcatctatatactccacaaggctagtttcttcttagatcaatgtagtatttttagtatccatattagcccatgtaggtcaacaaacttgcagaagagggttaaaaaacagctgtcctctgttactcagatacagttccaaaactaagcgattatataagcacatccatattttagggctactctaagttaaaaaccttttctcttgtttcagagttatttacatcaaattaagacatttacaaattgttcatagtatacaatagcccaaatatgattttcacctatgctgtgtaaagaagttaagcattcgtaagtttgtctaataaattcagtgcacttttttccataacacgagctattctaaatgttttacatttctttcagtgcatatttccaaattcattaaac

SEQ ID NO: 662 - DNA, 395 bp, Homo sapiens
  misc_feature 212: n = A,T,C or G
aagaaggccacgtgcaaatcctagatattgagtgttgtatgtttgtgacgttggtttcccgacatgtgaatggcccaagtgtctggaagaagtggcgccactttctaatttgcttggagatgttgcatgtcccttaaattcagacaggtgcaggtaactggaggttctgaaccaaaggttaaaatgcaaattctcatacagggttgggaagntgtagccagggataagcttatgtgactgttatatggactgaggagcagatgtgaatttcgaaccatgacatggctgagggtaggggtcgggtggatggatgattcagggttgtaacccatagagcccaaaggggaagtgatctgtgacctgggtgagggtgatctggaagattttggatggct

SEQ ID NO: 663 - DNA, 430 bp, Homo sapiens
acctacatagtttttaaattattgtttaaaaaacaaaacagctgttataaatgaatattatgtgtaattgtttcaaacatccattttctttgtgaacatattagtgattgaagtattttgacttttgagattgaatgtaaaatattttaaatttgggatcatcgcctgttctgaaaactagatgcaccaaccgtatcattatttgtttgaggaaaaaaagaaatctgcattttaattcatgttggtcaaagtcgaattactatctatttatcttatatcgtagatctgataaccctatctaaaagaaagtcacacgctaaatgtattcttacatagtgcttgtatcgttgcatttgttttaatttgtggaaaagtattgtatctaacttgtattactttggtagtttcatctttatgtattattgatatt

SEQ ID NO: 664 - DNA, 197 bp, Homo sapiens
  misc_feature 29: n = A,T,C or G
caaaaataatttgaccatgtatcctctanataaatattttgatgaaaactggacatggctagcatttttcaaagatgcagcaccactgtttaccttacttgagtcggatggaagctaagtcacctttgaaataaattactgacagcttcattacagattgccctaaaatttaaaaatttttatagaaaggattctcc

SEQ ID NO: 665 - DNA, 160 bp, Homo sapiens
acccaagtgccaggaagcaacgggatcagaggtggctccattgtagggcggggcacacagacacatccatgcataccactctcagctgcccctgtgtcctcctgccacacccatgcccatagagacacaccactgccccccagctctccttcagccaagt

SEQ ID NO: 666 - DNA, 429 bp, Homo sapiens
  misc_feature 398: n = A,T,C or G
cctcctggggtcaagtgatcttccagcctcagcctcctgagtagctgggactacaggcacagaccaccatacccagctatttaaaatttttttttatagagacagggtcttactatgttgcccaggctggtctcgaactcctggccttaagcaatcctttcatctcaaccttccaaagtgctgtgattacaggcaggagccaccacacccagcccagactaaactttcaaaagcaatacctaaatactgaaaataaatgaaacaaatcaacctagatatgtatcagtgggtgatacaaccacacagaacggaaagaacttaaaacacagtgttcatccccagagggaaacacccttgcaaaaatatgtcttaaaaaaatcttaaattactttcagtanctacattggtggtagtgttggtattatcatt

SEQ ID NO: 667 - DNA, 455 bp, Homo sapiens
  misc_feature 446: n = A,T,C or G
actttgtgctccacgacggcctccgccgctacttctcagagccactgcaggatttctggcatcagaaaaacaccgactacaacaacagccctttccacatctcccagtgcttcgtgctaaagcttagtgacctgcagtcagtcaatgtggggcttttcgaccagcatttccggctgacgggttccaccccgatgcaggtggtcacgtgcttgacgcgggacagctacctgacgcactgcttcctccagcacctcatggtcgtgctgtcctctctggaacgcacgccctcgccggagcctgttgacaaggacttctactccgagtttgggaacaagaccacagggaagatggagaactacgagctgatccactctagtcgcgtcaagtttacctaccccagtgaggaggagattggggacctgacgttcactgtggcccaaaagatngctgagcca

SEQ ID NO: 668 - DNA, 418 bp, Homo sapiens
  misc_feature 89, 365, 409: n = A,T,C or G
acaagctttttttttttttttttttttttttttttatggccaaacgtaactatttattcatttttttcttataaacattgagtttcttntttaaaaaaaaacacctagaatttaaatatttcccatcccatcacatacaagtctgtatacattatttacatcttttgaataaaacatattacagattttctgacatcagtatccctttttaaacaaaaatgaagcaattaaactttgatcagtaacaactacaatttgcataatccggcacagtttgtaatatagcgcctatgttggatttcataacttaaatgatttttccccttctagttacttgattataagagagaaactgtctccatganagtagttccctgtctttatgcactcttctcaatacttgcacagngtaaatgcc

SEQ ID NO: 669 - DNA, 392 bp, Homo sapiens
gtatgagaagagaaacctcgccagggtccccaagctggacctgaaaaggcaatatgacagggtggcccaactggaccagctccttcactacaggaagaagtcagctgagtttccagacttctatgattctgaggagccggtgagtacccaccaggaggcagaaaatgaaaaggacagggctgaccagacagtcctgacagaggacgagaaaaaagaactcgaaaacttggctgcaatggatttggaactacagaagatagctgagaaattcagccaaaggggctgactgtcattggagcggtgggcactgttaagaagcagccatcacatgatctgtttttcaccacttcactgaaagacaccatttaatgaatagtaagttctactttctg

SEQ ID NO: 670 - DNA, 426 bp, Homo sapiens
acataccatgaattgtgggaccttcagagcttttcacttttcggaaaatagctcctgctggggctacaagatggagtgtgaagagggccttgggccacagggaggcgcctgtggaccaaggggagttcatgcaccccctctttccccagaggggctggactcaggtgagtatgggggtgggggctcctgcacttcgacacaggcagcggaagggttttctccccattccctctgcactcccaacttgagctatactttttaagaaagtgattcaccctgcctttacccccttccccagaacagaacacgttgatcatgggcgatatttttcattgtgccaaaaagttgccatgaccgtcattaaacctgtttaacaccaaataataaggaaaataaaacaaaaagttcgggcatggtgcagaaact

SEQ ID NO: 671 - DNA, 523 bp, Homo sapiens
  misc_feature 499: n = A,T,C or G
acatttattgaggaaaccataatgaatacaaaattacagcaatcatgtgaccttttacatacaatgtcattaaagcaaactctaaaccacagttgtaaagtattcaatttacctcaagtccaagctgcatctccctaagacactgttcccatcacagtagccattttaagccaatcttctttttacacacgggtagtttctgtagagaacatttttctcaggacgaaaatgcatcgagcatgcataagaaaatatatatatatatatgcgcaaatacatttaagagtttctataggggtatcactgaagaaaataaaaccctgggatttatttgcttattaaaagcaccaatttaaaaaaatccctcaaaagcttatattgtggcaagaaaaatgaagtcactaactcaacaaaaaataaggtaactttcagagccaaaattatctttaattaggtattgttataatgcattttaaagtgaggcagagtttgcagaaanaaaacaagacatcctcactgatta

SEQ ID NO: 672 - DNA, 365 bp, Homo sapiens
acaagatctagagtttttccttagactctttagtcttttctgaattaaagaataagtgttcttaaatccatattttatcctgtcaaagtctgaaatgtgttcattgatgatttggtgacatctaaaaaattgtatttagttggcttggctcacccctcttaaaaatacttagccatctcttggtgggatgtggtgggggtattaaggtctcagagttatttattttctcacctaatttcaaacctttataaacttggggttttgttgttgatggtggtagtattttttgttaagttgtttaaaaggctgacttgattggagcctcctctactttttcttgagggttgcaagtattgtatggtggg

SEQ ID NO: 673 - DNA, 447 bp, Homo sapiens
  misc_feature 376: n = A,T,C or G
actcaagttccactcatacttctctaagaactcaaatatagtgacattactctcaagctaattcttttcaaataatcacagggtgcagctttaatctaacaggttctgaatgaatttcagaaccctggcactggaaaatgatacaagacacaagtctgtaaactgctctatagacaacagctcaagacaaattagcctagaaaagatagtgaaacacattctttgttgtgctaatttgacagcctaagtatattttgcgtgaacatatgtaaattatattagaattgctcttgaacgattttgtggtcttacatttgtttgttggttaagtaacactttttatctggcaatgtaaaaaatcttcacagtcttttcnagtagcatcttaatcttttctgggggacaataaattaaatgaagacttaggtgaccatgccgactctgggt

SEQ ID NO: 674 - DNA, 216 bp, Homo sapiens
  misc_feature 37, 65, 95: n = A,T,C or G
acaagctttttttttttttttttttttttttctaggnaaaacaggatgtaaagtttatatacaanaatataatgtttatctgaaatatttacagngttggttaaagcaatatttttacaacttttaaaggtaaactactatgtatattacaggtaagctacaatgggtttaatttgcaaaagttaagtaagaaatgttttaaacaaggcttaaagt

SEQ ID NO: 675 - DNA, 461 bp, Homo sapiens
  misc_feature 447: n = A,T,C or G
accaacatcaagcttggtgtgattgaagaccactcgaatcgaacacgtcttgctaaacttcttaggttccagtcttctcatcatccaactgacattactagcctagaccagtatgtggaaagaatgaaggaaaaacaagacaaaatctactgcatggctgggtccagcagaaaagaggctgaatcttctccatttgttgagcgacttctgaaaaagggctatgaagttatttacctcacagaacctgtggatgaatactgtattcaggcccttcccgaatttgatgggaagaggttccagaatgttgccaaggaaggagtgaagttcgatgaaagtgagaaaactaaggagagtcgtgaagcagttgagaaagaatttgagcctctgctgaattggatgaaagataaagcccttaaggacaagattgaaaaggctgtggtgtctcancgcctgacagaatc

SEQ ID NO: 676 - DNA, 481 bp, Homo sapiens
  misc_feature 473: n = A,T,C or G
actgctatttacagaatgaagtatttggactatttcagaaactggaaaatatcaatggtgttacagatggctacttaaatagcttatgcacagtaagggcactgctccaggctattctccaaacagaagacatgttaaaggtttatgaagccaggctcactgaggaggaaactgtctgcctggacctggataaagtggaagcttaccgctgtggactgaagaaaataaaaaatgacttgaacttgaagaagtcgttgttggccactatgaagacagaactacagaaagcccagcagatccactctcagacttcacagcagtatccactttatgatctggacttgggcaagttcggtgaaaaagtcacacagctgacagaccgctggcaaaggatagataaacagatcgactttagattatggggcctggagaaacaaatcaagcaattgaggaattatcgtgataactatcangctttctg

SEQ ID NO: 677 - DNA, 408 bp, Homo sapiens
acaaagtgagagaagcacaaaaccatttggtggaagtgataagtcaaatccatgatgtaaccttgtctttcccatcacctgatttttgctttaagccctggttttcaaattaatgatggaattaaagttgatgagggtgaactttgagcattaatagaccttggagcctttccctatgtgactttcattttgagctcttgctgtttggattttaatgacatttctcctttccaggacgctgccaaggtctgcagagaattcaccgagcgtgagcaaggagaagtccgcttctctgccgtggctctctgcaaggcagcctaatgctctgtgggagggattttgctgatttcccctcttcccttcaacatgaaaatatatacccccccatgcagtctaaaatgcttcagt

SEQ ID NO: 678 - DNA, 175 bp, Homo sapiens
acatagtgtagagggtgatgagggaggactgcaagaggccggagcgaggctggtgttcctgaatttttgggtggatcgatataatagaagccacaacgcaaaggatcaggttaatactgatgaagaacttgttttctgtgcagccatctggtttggtgtaatatgtatagagcag

SEQ ID NO: 679 - DNA, 422 bp, Homo sapiens
actgtaaaataagatctgccctgacattaagaaaaaaggcaactgttaaatttacttttccctttaaataacgggattttttccttttctataagattagcaaaatatttcacaatacctatattttttcccttaaataaaaatgtatgcaaaattactataatagacattgctcaataggtgctggtaggtttatcagcacactcttcctcctttcattgaaatgcggagattcccttgaagttggatactcttgaatgcaccatggagtctttagaaagcaacggtgccaattattaagtattacaggaaaattactttctccttgagagaggaagagtaacaacatttctatcatgctctgggtgttatttcaatgccaaataactatgaagcttgaggtggattacagaaattatgag

SEQ ID NO: 680 - DNA, 520 bp, Homo sapiens
acacttgagaataatatgtatactgtggttgttgggtggattttctatgtatgtttaggtgatatggttttatagtgttgtttaagtcttctattttcttctttttctgcccagttttatttttgaaagcatactgaggtctccaactcagtgccttagcctcctgagcagttgggactacaggcatacgccactacacccagcaatttttttgtatttttctgtagagacagaatttcaccatgttgcctaagctggtctcaaattcctggactcaagtgatctcgattcccggcctctgcctcccaaggtgctgggattgcaggcatgagctactatgcctggcaaattttatttttccttttattttgtcacataattaaagctactccagaattcccttgatttctgcttgcctggtatatcttttttccattttttaactgtcagccttttttgtgcctgttaatctaaagtatgtgtttcgtagataatatgtagctggatcatattttaaaat

SEQ ID NO: 681 - DNA, 434 bp, Homo sapiens
acaaggcaacattcggctcagcttcgaggacttcgtcaccatgacagcttctcggatgctatgacccaaccatctgtggagagtggagtgcaccagggacctttcctggcttcttagagtgagagaagtatgtggacatctcttcttttcctgtccctctagaagaacattctcccttgcttgatgcaacactgttccaaaagagggtggagagtcctgcatcatagccaccaaatagtgaggaccggggctgaggccacacagataggggcctgatggaggagaggatagaagttgaatgtcctgatggccatgagcagttgagtggcacagcctggcaccaggagcaggtccttgtaatggagttagtgtccagtcagctgagctccaccctgatgccagtggtgagtgttcatcggcctgttaccgttagt

SEQ ID NO: 682 - DNA, 288 bp, Homo sapiens
acttcttccacaaggccctatgtgagctcagtttaaaaccccagggccttggcaggggtcaggtgggcgggagcagggggcggaccttgtagcactggagctaaagcagccagataaggtgggctagttcttaagacctctggagggtgtggctagtctctgagacctggacaacttcattctccaccagggcctggcccccatccccattgagctgtctcatgcgcaggttaatggagccgtaggtcttcctggagcccttgccggggacgaaggtcctccggcggt

SEQ ID NO: 683 - DNA, 401 bp, Homo sapiens
acagcagtgataagcgggtaggcaggactatgtctcaccatgcagcagctctcaagcgtcacactgctcagctccgcgaagagttgctgaaacttccctgccctgaaggcttggatcctgacactgacgatgccccagaggtgtgcagagccacaacaggtgctgaggagactctaatgcatgatcaggttaaacccagcagcagcaaagaactccccagtgacttccagttatgagctgcattgatgtggacttcatagacacaaaggcttcgaagcacaagccaaatatgtcaatatttgtatgtaagaaactaattatgtaataggtaatgaaactgaaactatactatgcccttaaggagatccagtttaattcaaggtgatcttttatttacctgt

SEQ ID NO: 684 - DNA, 195 bp, Homo sapiens
actatggatgcttccgagagggggcgactattatacaagttggctgatttaatcgaaacagatcgtctgctgctggcgacaatggagtcaatgaatggtggaaaactctattccaatgcatatctgaatgatttagcaggctgcatcaaaacattgcgctactgtgcaggttgggctgacaagatccagggccgt

SEQ ID NO: 685 - DNA, 273 bp, Homo sapiens
actccacaaaacactacagacagtaacaaaataattcaataaatattaaaaactttcaatagaattataggacacttttttatcatatgtgagcatcaacaatgccacagccattagatatactattaaacacagtcatagatatctttcttgaataatggacataataaattttttatcaaggagtcataacatttacacatatccatacacaagataatagctcagaggaaatgaagcagactccccagtgacctggtttcatctgcctgt

SEQ ID NO: 686 - DNA, 295 bp, Homo sapiens
gtgactgccatcatcttcgtggtggccagcagcagctacaacatggtcatccgggaggacaaccagaccaaccgcctgcaggaggctctgaacctcttcaagagcatctggaacaacagatggctgcgcaccatctctgtgatcctgttcctcaacaagcaagatctgctcgctgagaaagtccttgctgggaaatcgaagattgaggactactttccagaatttgctcgctacactactcctgaggatgctactcccgagcccggagaggacccacgcgtgacccgggccaagt

SEQ ID NO: 687 - DNA, 464 bp, Homo sapiens
ccagcagctaggactgggagagataggagaagtaggactgctgtgattaggacggatcagacgaagaggggcgtttggtattgggttatggcagggggttttatattgataattgttgtgatgaaattgatggcccctaagatagaggagacacctgctaggtgtaaggagaagatggttaggtctacggaggctccagggtgggagtagttccctgctaagggagggtagactgttcaacctgttcctgctccggcctccactatagcagatgcgagcaggagtaggagagagggaggtaagagtcagaagcttatgttgtttatgcggggaaacgccatatcgggggcaccgattattaggggaactagccagttgccaaagcctccgattatgatgggtattactatgaagaagattattacaaatgcatgggctgtgacgataacgttgtagatgtggtc

SEQ ID NO: 688 - DNA, 536 bp, Homo sapiens
  misc_feature 490: n = A,T,C or G
acctgttcacaaaaggggaaaatatgcagaagacttgaattacacgaaagtataaatgtcagtagctgtgtaagagcaatcatagagggagaaggagtcctaaaaagaaataggcattacataatcaggatggagaccctcaaagagggataaagaaacccatgaaggagaaaaatggtgaagaataaagacaatgagaggagcaaaggcatgaaatccatgaagctgcttcaagacttaaggagaacaaggaattttaactcaccaggaaatgacctgtcttacgccataaggtttgaactacctcagtgcggtcagccttgctgggcagttcacttaaggaaaaagctgacactactacatcaaactgcaccttgggtgatacaggtagaaactgtctgaaaaagacacctggaatataaggctccccagattctgaaccacctttcagtagtttttctgccaaaaccaacatggcagctgatctgtncacacacatatattcacgtaggctctggccccaaatactgtgagca

SEQ ID NO: 689 - DNA, 157 bp, Homo sapiens
  misc_feature 10, 51, 57, 80, 108, 111, 128: n = A,T,C or G
acaagctttnttttttttttttttttttttttttacacgttttgttacacnaaaacnatgggtaggccccatctggggtnttggggagaaaagcaagttccccgattnatngaatgttccctgtttgnattccccatgccaggcagggcttcctaac

SEQ ID NO: 690 - DNA, 357 bp, Homo sapiens
acgtccctgcgggagcggggctcagatgcctcaggccagctgtttcatggccgagcccgggaaggctcctttgaatcccgctaccagcagccgtttgaggacttccgcatctcccaggagcatctcgcagaccattttgacagtcgagaacgaaggtgaggaagatggaggggtgctagagccaggaaggcagtggctaggtcctccttcttcagtgtttctttctcctgggtagaaaagttgtaatattgtctggcattgggctgcaaggccctgcctgccagtaaggacactcttcccttctgtccagggccccaagaaggactcgggtcaatggagacaaccgcctctagttgt

SEQ ID NO: 691 - DNA, 259 bp, Homo sapiens
acgccacggagatccaatctgaaaagcctgtcttgcggccttcactgccttgtcaacatcctccttatctccttcttctacctggcagagctcctcctcagttgcaggattaaagacaggaaatttcttgccactcactgaatcatgccattcattgtttatgaagatcttagtatattgaatcttcaaatcggtgagtaggacaggtaagtctggcgtgcctgaggatgacatttctgattcggctcctggaacacag

SEQ ID NO: 692 - DNA, 461 bp, Homo sapiens
ggcaccattaatgaggatgcaggagatcaggtggcccaggccttcgaagatatactggaacttgtgctgctgaaggctggcgctcatggcctcttcaatggcgctgatatctttgttgagcttgaccaccagggggtcataatccatactttccacattagccacaatggcatagttcccctcctttgcaagagggataagatagtggaaacagtgaaccctcacttccagatgtaagacaagcaagcagcggtcagccatatcctggaacgatttggcaagttcactgagagtctgcatgatctgctctgacactggggggagatccgtgttcgtgtggctgtcttgagcaggagaaagcatctgggatgtagaaagattggagaaagctgactttgttcgacttgccaaccattccaggctttcatgcatgttggccaaggctttgaggtcactgacgt

SEQ ID NO: 693 - DNA, 157 bp, Homo sapiens
acattactgcaatgttctcttaacagttaaacaagctgtttacagtttaaactgctgaatattatttgagctatttaaagcttattatattttagtatgaactaaatgaaggttaaaacatgcttaagaaaaatgcactgatttctgcattatgtgt

SEQ ID NO: 694 - DNA, 394 bp, Homo sapiens
acgcgaaattgtgttatgactgatagccttcagctacaaaaagataggactgacctggtttaaagtgttctattttgtaaatcattccatttgagtctttctgatgaacttggctatactgaaatctgttattttagtgaggctccaaaatgagcaaagctaggcctgattagagtagagtgactattaaaaaacataactttctaggagctataaatcaaagttttaaaaagatgtttggatatatttgagtattccgatcatgaaaacagaaattgccctgcctactacaaggacagactgatgggaaattatgcacctggtcaacttagcttttaagcagacgatgctgtaaaaactaacggcttctctgatatttattgtaagttttagt

SEQ ID NO: 695 - DNA, 399 bp, Homo sapiens
accacttttatcacaatggccttgcaaaggccaagagaagacgcagcctacaccacaagcagcagctggagagagaccccagggtaaagatggctttgcagcaggaaggatttgaccgaaaaaagcgaggttacagagacatcaatgagatcgacatcaacatgaacgatcctctttttacaaagcagtggtatctgatcaatactgggcaagctgatggcactcctggccttgatttgaatgtggctgaagcctgggagctgggatacacagggaaaggtgttaccattggaattatggatgatgggattgactatctctacccggacctggcctccaactataatgccgaagcaagttacgacttcagcagcaacgacccctatccttaccctcggt

SEQ ID NO: 696 - DNA, 560 bp, Homo sapiens
  misc_feature 506: n = A,T,C or G
caaaaactccctcattagctaccttgagcagatacaccgaggagttaaaggatttgtccgagaccttcaaggtaacccaattgcgaatgccaccatctccgtggaaggaatagaccacgatgttacatccgcaaaggatggtgattactggagattgcttatacctggaaactataaacttacagcctcagctccaggctatctggcaataacaaagaaagtggcagttccttacagccctgctgctggggttgattttgaactggagtcattttctgaaaggaaagaagaggagaaggaagaattgatggaatggtggaaaatgatgtcagaaactttaaatttttaaaaaggcttctagttagctgctttaaatctatctatataatgtagtatgatgtaatgtggtcttttttttagattttgtgcagttaatacttaacattgatttattttttaatcatttaaatattaatcaactttccttaaaataaatagcctcttangtaaaaatataagaacttgatatatttcattctcttatatagtattcattttcc

SEQ ID NO: 697 - DNA, 501 bp, Homo sapiens
cgatgagcagcggcggcagtggtggcggcgtcccggagcaggaggattccgtgctgttccggcgcggcacaggccagagcgatgattctgacatttgggatgatacagcactgataaaagcatatgataaagctgtggcttcatttaagcatgctctaaagaatggtgacatttgtgaaacttcgggtaaaccaaaaaccacacctaaaagaaaacctgctaagaagaataaaagccaaaagaagaatactgcagcttccttacaacagtggaaagttggggacaaatgttctgccatttggtcagaagacggttgcatttacccagctaccattgcttcaattgattttaagagagaaacctgtgttgtggtttacactggatatggaaatagagaggagcaaaatctgtccgatctactttccccaatctgtgaagtagctaataatatagaacagaatgctcaagagaatgaaaatgaaagccaagtttcaacagatg

SEQ ID NO: 698 - DNA, 483 bp, Homo sapiens
actgcctcaggccccaggcacagggggccttcctggcgtgtttcactcatacagagggcatcgggtcccaccctgtcactcatttcatcgtctaaaatgtaatcatgagtgtttgcttcgagccagggacagtgctgctgcaggggacccagctgggaccaaggcagactgtctctcccctcctgggatttacagggtcatggctctgaaacattctgtagtgttctttggacacgagttttccctggagatcgctttctgcaggcctcttggtcctgactgtggcttcttttcagagcctgccattcgctgcaaggttgaacacccccatgggccctggacgaactgtcgtcgttaaaggagaagtgaatgcaaatgccaaaagctttaatgttgacctactagcaggaaaatcaaaggatattgctctacacttgaacccacgcctgaatattaaagcatttgtaagaaattcttttcttc

SEQ ID NO: 699 - DNA, 385 bp, Homo sapiens
cgtaacttcatattaatataagtttctttagaaaacccaagtttttaatcgtttttgttttaaggaaaaaagatttttaaaatgaatcttatgcaaaactttttgatcagtttcttttcttttgtttttttttaaaaaagacatttaaagacaaagacattatttctcatagcaggaaatgtagaggtagatggttccagtatcagcatagtgactaaactacattataaaagatccagcttccttctgtcattcccctcttttgtcttcctcagcaggttggcttttttccctggtgcctctcacttcgttggtgaccagtttcttaaactgaaagctttaatgttacatagtaaatggtagtgtgtcctgtgtaaattagtgt

SEQ ID NO: 700 - DNA, 502 bp, Homo sapiens
actcagggtgacgtggaccggagggggcctctggccaaaccagactcttctctggtttgttcttcagaccacgaggtggaaccatctcttcaaaggagccctgccaccatcaccaaagctcacaccagaaaaaaccgccatttacacaacaaactgaacctgaaaaaggaacggaacatggtgcttccgccgtgaacaaaatcagcaagtgaatccgttttcctttcccgggctgttcgaaaaagattcggctagagaaaagggggcactgtgggcagcccgtagggaatggcctggagctgtggggcccgggctgagccctccctgccttttaactgcaggatgtaaactctatggaaatgtatagaacttcagtttctcccaaccctccacaacctcaactcttgagaccaccaaataactgttaggaaacgcagaagagagtccttcaaatgagctacacccaggttcagagcgcagaaccaacagtgtgactggggca

SEQ ID NO: 701 - DNA, 405 bp, Homo sapiens
  misc_feature 388, 398, 401: n = A,T,C or G
actgacaacaaatttccttaatttttgtctgagaaagtgtttctttttaacttttgaataataatctcacaaggtagagtgctaggtttatggtttttttttctctcaacactatgaatatttcactctttttcttgttggaagtcacatgtattttttcttttttttctttttttcctctacaggtaaggtgattttttccctctggcttacttcggatttttttcttatccttgaatttctgtaattacaacgttttatgcccagatgtagttttttggcatattttcaagctcagagattcttcatccatgcccagcctactaataagcccatcaaaggcattcttcatttctcttacagtgttctgttttttgtttttgtttgngttttatctntancact

SEQ ID NO: 702 - DNA, 446 bp, Homo sapiens
actgctgcagcgagccgggcagctacttcccctacaagcacagctacatgtggagcctcaggtcaaacttgtcagtgtcctaatcccagagaaagagcagaagcctaaaggcaagccaggaagataatgaagaaaaagatcattacttttcaatgacgtatgttccaaatacagcattggtgccttgattggactaggaattgctgcccttgttttactcgcctttgtcatcagtgtctgtgtcctttgctatttatttctgtatacgaaacctcaaagattagacactggccttaagcttcaacacttagaggcttcttccactcaagaaggcaagtcaaatggaaaaaccaaagccctcaattcaaatgcagcatcaaatgcaacaaatgaaacatactatgaagctgatgatataattcaagaaaaaacaatggatgcaacac

SEQ ID NO: 703 - DNA, 320 bp, Homo sapiens
acaatgttgaattcaaacaatctgttgaattaaattctgttgattagaataactctaatttaagaaaaattccaaactgtagatttatttttctctgatcagtaaaaagaaaatgagttccagcttgactttagctgttcaagtgagaagtctgaggaagtgcatgttaatgagccagtgacccataggtagctgggttaaagacactttggatttggataatccgggaagcaattaatccctaattgttgaacaggcagtcctgggtaaagaggacctaaaatgctgcactattaacagcattagacggccaggtttgt

SEQ ID NO: 704 - DNA, 449 bp, Homo sapiens
  misc_feature 411: n = A,T,C or G
acaaaaaggagaaataggtctttgcgttaatgaaaaatacattttttctctacaaaggaatcttttctaatacaagaaaataaatattgcaacataagccaaaaataatttaaaattgctcttttcaatatattttcaatatttctcttgtatattaacaaatggcacatcactttctttgaaacaaagacagaaggtgtctcctcctgtgacattcatatcatccccccaccgtcccctcaaactgacgtggaacacaaagtgtttgtgcctctgagggagaaagtggcaggaggtgccttaaagaacaaccaaaggtctcagactccagccctggctcattggccaatgtggccagcacggatgctacttgtccaatgatggtaaaagggtagcttactggttgtcctncgattcaggttagaatgaggaggtctgcggctaggagt

SEQ ID NO: 705 - DNA, 346 bp, Homo sapiens
  misc_feature 321: n = A,T,C or G
actctgattggtccccttctgcaaccaatcagactggtcgtgggcctagtctttatttgcataggggtataactttgtaacttcacttcagcctttgattggttgccttctgcaatcaatcagactggtcatgggccacttctttatttacataggctgtaaccaagtaaccagtgagaaacctctagaaggtatttaaaccccagaaaattccataaccagcatgcttgagcccactcccatactgtggagtgtgctttcgtttcaaaaatctgtagtttcattgcttcatttgtgtgttttgtccaattctttgctcanagtgccaagaacctggatgactcac

SEQ ID NO: 706 - DNA, 273 bp, Homo sapiens
actccacaaaacactacagacagtaacaaaataattcaataaatattaaaaactttcaatagaattataggacacttttttatcatatgtgagcatcaacaatgccacagccattagatatactattaaacacagtcatagatatctttcttgaataatggacataataaattttttatcaaggagtcataacatttacacatatccatacacaagataacagctcagaggaaatgaagcagactccccagtgacctggtttcatctgcctgt

SEQ ID NO: 707 - DNA, 506 bp, Homo sapiens
  misc_feature 430, 478: n = A,T,C or G
actagaaacctagcaggcattaataattgttgaggcaatgactctgaggctatatctgggccttgtcattatttatcatttatatttgtatttttttctgaaatttgagggccaagaaaacattgactttgactgaggaggtcacatctgtgccatctctgcaaatcaatcagcaccactgaaataactacttagcattctgctgagctttccctgctcagtagagacaaatatactcatcccccacctcagtgagcttgtttaggcaaccaggattagagctgctcaggttcccaacgtctcctgccacatcgggttctcaaaatggaaagaatggtttatgccaaatcacttttcctgtctgaaggaccactgaatggttttgtttttccatattttgcataggacgccctaaagactaggtgacttngcaaacacacaagtgttagtataattctttgcttctgcttctttttgnaaaatcatgtttagatttgattttaagt

SEQ ID NO: 708 - DNA, 293 bp, Homo sapiens
acttctatgggaaagtgaacagttctgtgacaggaaacatctctgtccatgccagcatagtagttgtatggacttctaaccagttgagttttttaaagcattgaggattttttcctcttaccaactcctcttcaggtttttaaagacccagcccttcccaatctcaaagagaaaaaggaaactgagttatcttgaataacataactttttaatcaaatgtttattttggcttgtggatcttggtgttatttaaaaaattgaggtgatggtcattgcaagctcatctattaagt

SEQ ID NO: 709 - DNA, 197 bp, Homo sapiens
actatcaagaactttgtttaaaaaggtgttaagaatactgaaagaatcaaaatatgtccttaaaactggcaaagttttttcttttttaagtttgagggcctattcgcagtatcttctctcttcttccgtttatacttttctataaaaatttctgctcattcttaacattttctaaacacagtagcttagataacagt

SEQ ID NO: 710 - DNA, 290 bp, Homo sapiens
  misc_feature 10, 14, 40, 62, 90, 119, 160, 213, 221: n = A,T,C or G
ttccaaactnctgntcaccatgaaaaggcaatcttaaagntcattatgttacactaattatnaacaggacccaatttatattcatagatnctctcaagtattatacaatttaaaaactnttgttccaaagtcctgtcttaactattgaaacaccttaatntgtggttactaatccaacaaattcaaggaaccaggctatgactaagaatttangtggaatngatgtctgggcaattaaaataaatggcataagagcttaaaaaccaaagttgtgccagtggctttcaact

SEQ ID NO: 711 - DNA, 302 bp, Homo sapiens
  misc_feature 43, 155, 192, 268, 294: n = A,T,C or G
gtacaagctttttttttttttttttttttttttttggctctanagggggtagagggggtgctatagggtaaatacgggccctatttcaaagatttttaggggaattaattctaggacgatgggcatgaaactgtggtttgctccacagatttcanagcattgaccgtactatacccccggtcgtgtagcggngaaagtggtttggtttaaacgtccgggaattgcatctgtttttaagcctaatgtggggacagctcatgagtgcaanacgtcttgtgatgtaattattatacnaatggggg

SEQ ID NO: 712 - DNA, 262 bp, Homo sapiens
  misc_feature 32, 92: n = A,T,C or G
acaagcttttttttttttttttttttttgtanaaatcttggttgcaatttactaacagaactgagctttggaacatctcaggcctggcacanaatgcagtttttacacaagttgtaagtgaaatagaagatgaataagtgtaaacatctatttatgtataaaaactcatacaattattggttagctgggtataagcccattatgaactctgaaaagtatgtcttaagatccatttgtttttttcaaatggggaaactaaggt

SEQ ID NO: 713 - DNA, 469 bp, Homo sapiens
gggcgacctgcagtgctttatcggactagatatgatatcttatatcacactgactttgaaagtggttatagtgaaatattcctaatgccactctggacatcatatactgtttccaaacaggctgaggtttccagcgttcctgaccatctgaccagttgcgtccggcctgatgtccgtgtttctccgagtttcagtcagaactgtttggcctacaaaaatgataagcagatgtcctacggattcctctttcctccttatctgagctcttcaccagaggctaaatatgatgcattccttgtaaccaatatggttccaatgtatcctgctttcaaacgggtctggaattatttccaaagggtattggtgaagaaatatgcttcggaaagaaatggagttaacgtgataagtggaccaatcttcgactatgactatgatggcttacatgacacagaagacaaaataaaacagt

SEQ ID NO: 714 - DNA, 347 bp, Homo sapiens
accttctcacctgtgagaccaaattgagctaggggggtcagccagccctcttctgacactaaaacacctcagctgcctccccagctctatcccaacctctcccaactataaaactaggtgctgcagcccctgggaccaggcacccccagaatgacctggccgcagtgaggcggattgagaaggagctcccaggaggggcttctgggcagactctggtcaagaagcatcgtgtctggcgttgtggggatgaactttttgttttgtttcttccttttttagttcttcaaagatagggagggaagggggaacatgagcctttgttgctatcaatccaagaacttatttgt

SEQ ID NO: 715 - DNA, 473 bp, Homo sapiens
  misc_feature 127, 170, 372: n = A,T,C or G
acaagcttttttttttttttttttttttttctcgttaaactcaaactgggtctatgtgacaaaaagtgaaaaatagagttaattgtctgaatgttttcaaatatacagatgctctagcactgtgtanacacagtgaccctgtacctgccccaggcacttttttcctgcanatgttctggcatgtgcagagaaggcctcaggttgggggaaatctgatgatgtttcttgagctaaagttgcgtacatattgtccattatttatccaatacaggaaatcagtttccatcaaaatacaattctagagggaaatttctcattgcctggaaagttaggtgctggaaatttgccataacaccattaagtattgaatanaatttgaaataatgtaggttcttcttggaagtcagccaagagacttatttattgttaccaaattaaaaaaaaagtgattttaaagttggaaataaaatgtg

SEQ ID NO: 716 - DNA, 266 bp, Homo sapiens
ggacaagtatattctgctgccacaaagactgtaaagtgcttcatttcaacagctgaggcaagccaagtgatcattaataaagcttttcttggttccttcagtggtgttggtagtaaaatggtaggtaaaagttaggctgcaagttcaataaatcatgagatttcccatcgttacacccttgtgtattcacatttcttggatcaaacattttgagtgaactaggggtttttattaaagacatttgttgtatttatggttgtaactgt

SEQ ID NO: 717 - DNA, 326 bp, Homo sapiens
actggtcgttataatttgctttgacgagtctctctgccaggtgatagctgcatgtcagggccagattctatcccctacttgcgcctgcctcccctgtcccccaacaatgttctgagaaggtgtcaccagggcagtgtctatacctcagactcttttattcttccagcagtgaagacagttcctatgtcacctttctacaattccgtagatgaccagttttaacctgataaaaataatttgtggtaagatgtgaatgggggaaataatgaattcgtttgttatctctctgaaagaaaaaagaaattgaatttaaaagaggtcctggt

SEQ ID NO: 718 - DNA, 475 bp, Homo sapiens
acacttacaaccagtgaaaagacaaatagtttcagaacaggttgtaaactttctttaaaagtgaccagaaaataatgtagtcagaaagctacttactgtgtgtttccatttgctctgagagaagtgctgaaaaggtttgctgtcctctctttgtttctactatctgtattctatcaccctactatatgcttacttattcattatattcataagattgtcactggttctgcaagaattgttcagagagtctctcatccccaccctcaccattcccaatattggggaaaaactttagaaatccaagataaaggagggggttgaagtaggaagttatctaagtgcaaaaagggaagttaacagagtctctgcacaattcagaagaaggagagttagaagaaacatttgtcaagcaaggctacctacatatgggatgaaggaagaggactgaagctattcttccaccaatctgtgtgtg

SEQ ID NO: 719 - DNA, 473 bp, Homo sapiens
gaaagtcaaggctgtgcagtatgtgcacagagtgcttgcacatgagctgttatgccctcaaggaggccccagctgtgaatattacttggtgctggcccaaacacacattcttaagaagaactttgccaaggcagaggaataccttcaacaagcagcccagatggactacctgaaccccaatgtctggggcctgaagggccatctctattttctgagtggaaatcattctgaggccaaggcatgttatgaacgaaccattagctttgtagtggatgcttctgagatgcacttcatcttcctgagactggggctcatctatctggaagagaaagagctggaggagctcacagaggctgaggatgctctttctgaagccaatgcattgaacaactacaatgctgaagtatgggcatatctggctctggtctgcctgaaagttggacggcaattagaagctgagcaggcctacaagt

SEQ ID NO: 720 - DNA, 293 bp, Homo sapiens
gtaatatctttaaatgatgtacaggcagatgaaaccaggtcactggggagtctgcttcatttcctctgagctgttatcttgtgtatggatatgtgtaaatgttatgactccttgataaaaaatttattatgtccattattcaagaaagatatctatgactgtgtttaatagtatatctaatggctgtggcattgttgatgctcacatatgataaaaaagtgtcctataattctattgaaagtttttaatatttattgaattattttgttactgtctgtagtgttttgtggagt

SEQ ID NO: 721 - DNA, 153 bp, Homo sapiens
acacattttgatttaaatgagctaaacacagttaaataactgagtgacaaaatggttgtttagggcagtcttatctgagtgaacatatcttctgtatgttgctgttgctgtgtggtaatactctgacaacactgaaatcctagccctgtaagt

SEQ ID NO: 722 - DNA, 216 bp, Homo sapiens
caaagcagctgtatgtagatagtgtattgtcttcacaccgatgattctgctttttgctaaattagaataagagcttttttgtttcttgggtttttaaaatgtgaatctgcaatgatcataaaaattaaaatgtgaatgtcaacaataaaaagcgagactatgaaaggctcagatttcttgcagtttaaaatggtgtctgaggttgtacctgcccgg

SEQ ID NO: 723 - DNA, 504 bp, Homo sapiens
  misc_feature 493: n = A,T,C or G
acttttgtgggttcataattggtatccctgctgggtcctctggctgcaactcctttgactcaagcaagagccttgttttccaattgctgctgattaaccagcacccccatcaaggccttggttttctagtggttccatccctaccaactcttgctcttggagccaaactggctttcccagatggtcctcttgggaaggacatcaaatggctgaaggccaggtctctctttgagcttaatgtgagttagataactgcagcccgctttaagagagggtagggttggactcacggcactactcagttctctctctcttaaaaatatatcttcacaagttcttgctcaggcatgaaagggtgcattttctgcctttggtcctggtgtctggctatgactgtccatcctgtgtaaatgaggagagtaagtctgagcaaaaggacaaagtgctaagatggcaaagcagaacctgggtgatgtgtttgaacctcttaatnacctaccctgg

SEQ ID NO: 724 - DNA, 177 bp, Homo sapiens
acttttcaagccactggagggagaaatggaaaacatgaaaacagcaatcttcttatgcttctgaataatcaaagactaatttgtgattttactttttaatagatatgactttgcttccaacatggaatgaaataaaaaataaataataaaagattgccatgaatcttgcaaaaaaaa

SEQ ID NO: 725 - DNA, 221 bp, Homo sapiens
attctattgaaagttttttatcatatgtgagcatcaacaatgccacagccattagatatactattaaacacagtcatagatatctttcttgaataatggacataataaattttttatcaaggagtcataacatttacacatatccatacacaagataacagctcagaggaaatgaagcagactccccagtgacctggtttcatctgcctgtacctcggccg

SEQ ID NO: 726 - DNA, 221 bp, Homo sapiens
acaaattatttggctcgacttctagtttttgtcttatttcaggcagctctgtccagtggagtgacccgttgccagagtgcagagaaatttattgtccagcaccaccacaaattgacaatggaataattcaaggggaacgtgaccattatggatatagacagtctgtaacgtatgcatgtaataaaggattcaccatgattggagagcactctatttattgt

SEQ ID NO: 727 - DNA, 493 bp, Homo sapiens
gctactataggaagtgaccaagttcactcctggatgctagctacaagccaagccttagacactgtctggagaatggcaaaaggctttgtgatgttggcagtttcatttctggtggctgccatctgctacttccggaggctacatttatattcagggcacaagctgaaatggtggattggatatctgcagagaaaattcaaaaggaacctcagtgtggaggcagaggttgatttactcagttattgtgcaagagaatggaaaggagagacaccccgtaacaagctgatgaggaaggcttatgaggagctattttggcggcatcacattaaatgtgttcgacaagtaaggagagataactatgatgctctcagatcagtgttatttcagatattcagccagggcatctcttttccatcatggatgaaagaaaaggacattgttaagcttcctgaaaaactgctgttttcacaaggttgtaattggattcagcagt

SEQ ID NO: 728 - DNA, 497 bp, Homo sapiens
actgagccctgaagcagttcgaaatacattgagtttgatgcattcctgtggcatgtatgacttctcagggcagtttgctttccatgttggtcttcctgcaaaatctggagttgctgggggcattcttttagttgtccccaatgttatgggtatgatgtgctggtctcctcctctggataagatgggcaacagtgttaagggaattcacttttgtcacgatcttgtttctctgtgtaatttccataactatgataatttgagacactttgcaaaaaaacttgatcctcgaagagaaggtggtgatcaaaggcattcctttggaccattggactatgaaagtctccaacaagaacttgctttaaaagagacagtatggaaaaaagtgtcacctgagtcaaatgaggacatctctacaactgtagtatatagaatggaaagtctgggagagaaaagctaaagaaatgggttctagtttcagaatgtttcttcatttaatc

SEQ ID NO: 729 - DNA, 203 bp, Homo sapiens
  misc_feature 131, 160, 197: n = A,T,C or G
acaaagaggaacaactcgcttgctcagggtaggcgggtagaggggggcctgtccttctggttttgctcccaaactgccccatagtcccagggggaaagggtccctgatgtggggcagcacagccatacagncactgtccccgaagaagtaggatcctctntgtctccttgggggcgggagacggggagacagctcangctctc

SEQ ID NO: 730 - DNA, 515 bp, Homo sapiens
accttttcttcccatcaaaaatgcattaacaagatcatgcttatagttagtcagcacaagaaaaaaacgacaatttatactgaactatttaagtcttgcagtagagtgctcacaactccgagctgtatctgttaaccttttcaatagcattcattatgtgacattgtcaccaattacagtaaaagaacttcactaatttttgaaagctagaattactcaaaaaattctgcattgtaaataataccaggaatattgcatttaagcctaggatggcaaaattacttaaatcttttctatacttttttgtgtaatataggtaggaaaatgaatactatataagagaatgaaatatatcaagttcttatatttttacctaagaggctatttattttaaggaaagttgattaatatttaaatgattaaaaaataaatcaatgttaagtattaactgcacaaaatctaaaaaaaagaccacattacatcatactacattatatagatagatttaaagcagc

SEQ ID NO: 731 - DNA, 276 bp, Homo sapiens
acacacaacctgattttaatattctatctgctgcagaaatacttatcagctttcaaatcaaagtgaaaagaaaatgagttaatttaaatggcaaattcaaggacatttatacaaacattatattcttaattttggcaataatttttaatattttgccttaaagtcctgggaacaaagggctcttgctatccattcatttcattaggtgaactgaagatatgagtgggagaagttattctggatcacggacacacattagcatggaaataatgatgt

SEQ ID NO: 732 - DNA, 254 bp, Homo sapiens
aacagctcggctttcaaaaagctgtcagctcaggtagcacgccttggtcttgaattcggtgctacgctgacagctctccttctgaatgcaaaggcaccagtccatgatcaagtccacgccgcagacgaggagagaggagtcttctctccaaagtcatccaaagatagctgaggaaataattctatctcatttctcgattccatttcagcacagcagctgttttccacactgagacacagctggcgagcagtatc

SEQ ID NO: 733 - DNA, 62 bp, Homo sapiens
  misc_feature 9, 43, 53: n = A,T,C or G
gaaacaaantttgtttcaaagaggtctgaaattttaaaatcanaccaaccagngggtagatg

SEQ ID NO: 734 - DNA, 451 bp, Homo sapiens
acttaaactccagaaagaaaaagctaggaaacagaagtagagaggaatggaaaaaaacaaaaaaacccaatacctctgccatcttgccccatcataacccaaatagcatcaaagtggcagagatgggactaaagttaaagcaagcatcaaagttattacttttagggtaatgggatgaatttgaagagcactatgtcaaccaaatactaaacttcatggaataactgtgtttgtgtttctgtggaggagttgcggttttgtttgttttaatttggcccacgctgccccaatggaggaaattttaagataatcattaataaggcaacagcttccaggattaaaatacctataccatctatacggagttacaatgaggacaagacccacatagaccacaaaggaaaccgggaccagaagcttccagtgcattttcacagatcgttggtacctg

SEQ ID NO: 735 - DNA, 464 bp, Homo sapiens
acctggagggatgcaagacttcaattaccttagcagcaactgttttgagatcaccgtggagcttagctgtgagaagttcccacctgaagagactctgaagacctactgggaggataacaaaaactccctcattagctaccttgagcagatacaccgaggagttaaaggatttgtccgagaccttcaaggtaacccaattgcgaatgccaccatctccgtggaaggaatagaccacgatgttacatccgcaaaggatggtgattactggagattgcttatacctggaaactataaacttacagcctcagctccaggctatctggcaataacaaagaaagtggcagttccttacagccctgctgctggggttgattttgaactggagtcattttctgaaaggaaagaagaggagaaggaagaattgatggaatggtggaaaatgatgtcagaaactttaaattttt

SEQ ID NO: 736 - DNA, 406 bp, Homo sapiens
  misc_feature 350: n = A,T,C or G
acagccttttgtttttcttaccctttttaaaaataaatccattgtcagaggaaggcaacactttttactatttaatcattcacttactggttcattcaacacaacagctatttactggatgctgctggggtcagggctgggaacacaaacacgaagagaccacagtgctcacccctcaggaacgaacaatctagggcagccaacacagaaatcaacaatcgtcacggtgccagatgaatgctgcagggaggaatgttcggagtgaaataggcacccttaggtttgctctatggaatcacggaagccttcccagaggaggaagcattgggtcaaggtgggaggtgagccanagtgtgtcaggctaatgaatgtggtgggctggggaggccattccagatggacggga

SEQ ID NO: 737 - DNA, 512 bp, Homo sapiens
  misc_feature 464: n = A,T,C or G
acttgtttgcaccaaacctaacttttgtgcattttaagtgtcagggaaggttaggatcacttcaccatacacagacacatgggaatgtaatccactcagttaatattatctggtgcacagagcagataagaggctagacatctggaaagattcttcaaacaagaacctgattaaaaaatcttcaaggtaaaaatgtaatttagtctatttgaaagcaaaattgttagtttaattaacttccacatacatagtgtgggctttcaatctacaaattataaaaccagaccattcaatttgaaagaaaaacaaaaacaaagcatgccatccatgctttctgttaaaaaagaatgttcttcataatactgacaaacagtttcaatgtcaccgttcactttatagaaatgttgctttatggctgggcgcggtggctcacgcctgtaatcccagcattttgggaggccgangcgggccgatcacaaggtcaggagttcaagaccagcctgatcacatgg

SEQ ID NO: 738 - DNA, 177 bp, Homo sapiens
attggtttaaaaagaaaagtgtaatgcaagaatttaaagaaatatttttaaagccacaattattttaatattggatatcaactgcttgtaaaggtgctcctcttttttcttgtcattgctggtcaagattactaatatttgggaaggctttaaagacgcatgttatggtgctaatgt

SEQ ID NO: 739 - DNA, 283 bp, Homo sapiens
acaggcagatgaaaccaggtcactggggagtctgcttcatttcctctgagctgttatcttgtgtatggatatgtgtaaatgttatgactccttgataaaaaatttattatgtccattattcaagaaagatatctatgactgtgtttaatagtatatctaatggctgtggcattgttgatgctcacatatgataaaaaagtgtcctataattctattgaaagtttttaatatttattgaattattttgttactgtctgtagtgttttgtggagtacctcggccg

SEQ ID NO: 740 - DNA, 410 bp, Homo sapiens
acccagaccctccaaatccctgtcctgttggaaaaacagatgatggatgtctagaaaacacccctgacactgcagagttcagtcgagagttccagttgcaccagcatctctttgatccggaacatgactatccaggcttgggcaagtggaacaagaaactcctttacgagaagatgaagggaggagagagacgaaagcggaggagtgtcaatccatatctacaaggacagagactggataatgttgttgcaaagaagtctgtcccccatttttcagatgaggataaggatccagagtaaagagaagatgctagacgaaaacccacattacctgttaggcctcagcatggcttatgtgcacgtgtaaatggagtccctgtgaatgacagcatgtttcttacatagataatt

SEQ ID NO: 741 - DNA, 467 bp, Homo sapiens
actatgacctgacaagcaatgcagtcctcacattcatctattttgtggtctgcatcattgggttgtgtggcaacacacttgtcatttatgtcatcctccgctatgccaagatgaagaccatcaccaacatttacatcctcaacctggccatcgcagatgagctcttcatgctgggtctgcctttcttggctatgcaggtggctctggtccactggccctttggcaaggccatttgccgggtggtcatgactgtggatggcatcaatcagttcaccagcatcttctgcctgacagtcatgagcatcgaccgatacctggctgtggtccaccccatcaagtcggccaagtggaggagaccccggacggccaagatgatcaccatggctgtgtggggagtctctctgctggtcatcttgcccatcatgatatatgctgggctccggagcaaccagtgggggagaagcagc

SEQ ID NO: 742 - DNA, 472 bp, Homo sapiens
gagctggagaatcagtgctgtgtgtggatacaggtgcaagctggcccaggagaatggctggggggtcatggtgagtcatcgctcaggagagactgaggacacattcattgctgacctggtggtggggctgtgcacaggccaggtgagtgaggcagcctggtgagtgaagagaactctctgtgggattggtatttctagctcacccacctggtctctccttccaggtgtttgagggtgtcaggggagtttcaggagagcagaagtttcctttcaggggtgagagggcagtcactgagctgcaaatcctttgaaatgtttcagatcaagactggcgccccgtgccgttctgaacgtctggctaaatacaaccagctcatgagaattgaggaagagctgggggatgaagctcgctttgccggacataacttccgtaatcccagtgtgctgtgattcctctgcttgcctggagacg

SEQ ID NO: 743 - DNA, 296 bp, Homo sapiens
ctaatttcctctgagcatttaaaattacatccagtgataaaaacaatatttttttttcagaatttcatgctttaaaaagctgtggcttctctatagacaactgttacattagggaagtgattctagagcaaaatatactgcctcaacataagtcgttactgactggaaaatgctataggcagaattgcaaagagtggctcaaacatatagtttgcttgcagaatgtaacgtgcaaaatcacatacatgcgatgtatttacctttgctagacaatgagaattgaataattgatttgt

SEQ ID NO: 744 - DNA, 386 bp, Homo sapiens
  misc_feature 165, 349: n = A,T,C or G
acttttatatatactatctatgaagaattcactaaagcatgaatcaccttataatgagaagctaaaaatgtatcaaaacgaacataagtataggtaatccacatcaaacatactacatcttccaagtctagagcatacactggtataaactgtattacaacccanattagtttgaaatcttgtttcaaaacattgctcagtattaagtctcagtagacaaataataggaccacatgagaaactgttcggcaggtggctgaggaaaccttaacttccaaaggctcaaagtggtcctccagagactgttacactcccttaggtatttatttaagggaaggacactattaanggacacttttgagtataaagacaggtgaactcacaaa

SEQ ID NO: 745 - DNA, 273 bp, Homo sapiens
acaggcagatgaaaccaggtcactggggagtctgcttcatttcctctgagctgttatcttgtgtatggatatgtgtaaatgttatgactccttgataaaaaatttattatgtccattattcaagaaagatatctatgactgtgtttaatagtatatctaatggctgtggcattgttgatgctcacatatgataaaaaagtgtcctataattctattgaaagtttttaatatttattgaattattttgttactgtctgtagtgttttgtggagt

SEQ ID NO: 746 - DNA, 466 bp, Homo sapiens
gccctgcagattagattacttagcacactgtggaagtttaagtggaaggagggaatttaaaaatgggacttgagtggtttgtagaatttgtgttcataagttcagatgggtagcaaatggaatagaacttacttaaaaattggggagatttatttgaaaaccagctgtaagttgtgcattgagattatgttaaaagccttggcttaagaatttgaaaatttctttagcctgtagcaacctaaactgtaattcctatcattatgttttattactttccaattacctgtaactgacagaccaaattaattggctttgtgtcctatttagtccatcagtattttcaagtcatgtggaaagcccaaagtcatcacaatgaagagaacaggtgcacagcactgttcctcttgtgttcttgagaaggatctaatttttctgtatatagcccacatcacacttgctttgtctt

SEQ ID NO: 747 - DNA, 548 bp, Homo sapiens
acagttaattctactgttttggctgcaataaaatcgattttgaaataaatgaaatgttgaaaattttgctagttggttagatgcttatcctttaaattctacttttcttgaggggaaaaagtcttcgtctggaaatacatattactgcaaaaatgtagcatccttttttaggtaggagtattatagctttcattttagtttgacatttagtgtcccaatgaattgaatttcaaatatgatcataatcttgaaaatctttagcactaaagtcttggaatatatcaacaactgatttacatatgcagatgctatttgataccaagggctttttaaatgtcatggggggaaaaacccaacttggtgaactcccagctaaacaaccaagacttcactgaagatttattccaattctagaattgttcttttttatttttattttttcaactgactaacttcattaccttaaagcctagaacattattctgctttatttatatggctttctcacttttattttgtagcatgggttgcatcgacttttttactag

SEQ ID NO: 748 - DNA, 449 bp, Homo sapiens
acattagtaagcaaatcattccaaacccctttaacaatgttcttctatgtcctatgcaatccttgctttagattcttatcttcattatcatagtcttcctaacactcatctttgagtctttggtattttcttaaatacacctttggcacctagtttttccaatctgttttatcagttaatgacaattctttaaatgatatgctccataggacaaaacttcagacactgaaatctgacatctcactcaaacctgaaagaacagtatgaaccacttcaaacaatttcatgaatctatccaacttgttaaataattatctgtaaaattgcaaaacatagggacttatctaaacttcaccaccaaaggcattctgaaacaatttgtcaaatagtgaatgatcaactattatacaaaaatcagtgcaaagtttcatccaggcagccttaaatgt

SEQ ID NO: 749 - DNA, 380 bp, Homo sapiens
actagattctggagtgtttttcaaatattttaaaatatttgccacttatggttaaaaaaaacgtgaataagaatatcatgtgagtgtagataggcaccatactatacactcctctcagaatcatttctagaatgtgtataatcccggcgttaagtgatggtgggaatgatttgcctttaaaagcctacaaattaaaaggggaaagatgctaagctagatgctggttttctgtaaagatgaatttgtgaaaaactgctttatggtctagaaatacgtaagcctggcattagctgatggcacattctaacattttatagcattaaaaaacatcgactcattccattggatgaaagccatggtgacatttttacaaaagctgt

SEQ ID NO: 750 - DNA, 413 bp, Homo sapiens
gtaaaatccattaaagaacaggaaaaaataattataagatgataagcaaatgtttcagcccaatgtcaacccagttaaaaaaaaattaatgctgtgtaaaatggttgaattagtttgcaaactatataaagacatatgcagtaaaaagtctgttaatgcacatcctgtgggaatggagtgttctaaccaattgccttttcttgttatctgagctctcctatattatcatactcagataaccaaattaaaagaattagaatatgatttttaatacacttaacattaaactcttctaactttcttctttctgtgataattcagaagatagttatggatcttcaatgcctctgagtcattgttataaaaaatcagttatcactataccatgctataggagactgggcaaaacctgt

SEQ ID NO: 751 - DNA, 440 bp, Homo sapiens
acctgtaatctaagctgcgtattctggaactatttatttgtggtcaacagatttcagtgcattagaaagtgatgtgctgcagatgtataggtcagtttgtcaggaaaagatacccaaggtcaggaattgaatttctcaggagtttctaacaaaatgcctgcctgcctgtgaatacaaaaggagactgggaattgcccccaactggatacagtcaattcctactactttgaaataacatgtagtatagctatatataagaatacataagctcacacagagaaaaagcatggaaagagtgtcatctagaaatgataggtatgtaagaatattataagctttaaggcactacacagaggttttagtaatggaacagttaactaccatctatggtgcttaattcatacctatgttacaacctcatccagcagggctcattctag

SEQ ID NO: 752 - DNA, 440 bp, Homo sapiens; identical to SEQ ID NO: 751

SEQ ID NO: 753 - DNA, 342 bp, Homo sapiens
aaatggtgcccaggttgactgctgtactgcagactgcaatggcagctggaagtttaggtctcctcctacctggatctcattacttgggccgttttcaggatcgtttaatgtggataatgattctggaatgtggctatacttattgctctattaacattaaggggttagaattgcaggaaacatcctgtcatactgcagaagctcgcagagttgatgaagtttttgaagatgcttttgagcaagaatacacaagagtatgttcccttaatgaacactttggaaatgtcttgacaccctgtacctgccgggcggccgctcgagccctatagtgagtcgtattag

SEQ ID NO: 754 - DNA, 252 bp, Homo sapiens
acaattcataacaaaggttaatagagaaagagacatgggattagggagggaatggaagagtttgggccttggacactgtagtggtttgaatcctgtccaccaaaaattcagatgcatttggaacttcagaacctgagacctcatttgaaagtaggatctttgcagatgtcattgagtcagggattgagatgaggtcatcctggattacagtggactcgagattccatggtaagtgcttttatatgagaaggt

SEQ ID NO: 755 - DNA, 151 bp, Homo sapiens
acttaaactgtgcagaaaagatgaaatcactggataatatgtattataaaataagcttcatgtgagtgacactggtttaagttgaaataaaatggtgaaagcattgatatcaatcattgtgactttatttcaaaacaatattgacacacat

SEQ ID NO: 756 - DNA, 449 bp, Homo sapiens
actagacacatatttgactatatatacactggtatgggatgagcagacctttgtctgcataacatttggctccacacataggttttattgttaactaggtaaaacagaagttatttttataaattatatgcagagtagttatcattgtatagaattgtatatactcatagaaagctgaaagctgttattactggattatgaactcaaaacctatgatccagacatattggcttcaagctaaaatgattttttaaatatctatttcagaaaattttatattcattcatttttaatcctgtgagttatccaccatttcttgacaaccaaggagtgagtgctgagatcacatagcagcttcttatctaatagaataccattgtatatgaaccagtaaaaacaccaggaatgggaataatgacaaatatctaagtaagttgtgaaatctaagt

SEQ ID NO: 757 - DNA, 462 bp, Homo sapiens
actactaaattaataaatttattccacttttgaaatgacagccaaaaatccacctaattgattctcatttggcacgttcttctcaattctgttcactaaattaaaattactaaatttaaactgccaagagccatgatgttgtctgcacaagacaacattttccatcactttcagaaagttatatttggcatgttaaggaaaaaaaatataatcccacagcagcagctatttaaaataagacagccacaggattcatgcagaatattttaaatattcctgttgaacacaatgatttaattgattttttcttcacggatgatgctcccaaacatcctatatgcatccatggaaatttaaagatcctggaatagcgtcttccatgtgggacatcttaaaagatagtattttggcttcagtgagttacacaaatgaatcaccagtccttattaattcaatgggtct

SEQ ID NO: 758 - DNA, 423 bp, Homo sapiens
  misc_feature 357: n = A,T,C or G
accggaatccacagaacacagcccaaactgcagacggatcacactgtgagtaagggaccaggcctgggggcaaggtgaacagcccccagtaggctacactctgattccaccctgcccgcccccaccccaggtcatgtgagtgacgtggaggtgcaggagcactatgatagcttcttcgaggtgagggttggtaggggcagatggggtttcttgtgggagctcagctgagttcctccccgtcttccacaggaggtgttcacagaactgcaggagaagtatggggagattgaagagatgaatgtgtgcgacaaccttggggaccacctcgtgggcaacgtctatgtcaagttccggagngaggaggatggagagcgggccgtggctgaactcagtaaccgctggttcaacggcaggctgtgcacg

SEQ ID NO: 759 - DNA, 260 bp, Homo sapiens
gaagctcgcccggagaacggggaggaatatgctgtggagctcctctgccatataaacaaaaagaggaaatctttcaaacatggctgaagcaaagacccactggcttggagcagccctgtctcttatccctttaattttcctcatctctggggctgaagcagcttcacttcagagaaaccagctgcttcagaaagaaccagacctcaggttggaaaatgtccaaaagtttcccagtcctgaaatgatcagggctttggagt

SEQ ID NO: 760 - DNA, 462 bp, Homo sapiens
  misc_feature 420, 439: n = A,T,C or G
gctggccaacatcctgaaaccctgtctccactaaaaatacgaaaattggccgtgtgtggtggtgggcgcctgtaatcccagctactcaggaggctgaggctggagaattgcttgaacctgggaggtggaggttgcagtgagccgagatcgcgccatcgcacttcagcctgggcgacaaaagcgcaactctgtctcaaaataaataaatacataaaattaaagaaaaaaagtaaagcataaggcctggtgcagtggctcatgcctgtaatcccaacattttaggagcccaaggccggaggatcacttgagcacaggagttcgaggctgcaggctgcagtaagctatgattgtgccactgcattccagcctaggcaaccaagtgagaccctgtctctaaaagtgaacaaacaaataaatgtnaagcataaagctataattnttagaagataacattggaaaaaa

SEQ ID NO: 761 - DNA, 310 bp, Homo sapiens
acaaatgcctatgcgcatctttttctcggatggtctcatttgactttcatttcgtaagggttcactctccatggtgtagatgataagctaccacatttgtgcttttaaacccattcctggcaatccccctttatcttcattttgtctttagggggataaagaagtaacactacctcatgaatagaaactatgaagccaaaaaactccttcacaagctgctcatttctttttagaatgaaaatgcaggtcctgaattctcgtgaagcagcccacagggttacaggccaatgattcgaacgctgaggtgaac

SEQ ID NO: 762 - DNA, 584 bp, Homo sapiens
ttttttttttaccagaaataaaattttattagtaacatgtcaaatgttttaaaatacaattacctttcttcttcctctcagtttaaaaaacaatccaataaaaactctaaatcatgatccaaatatttttaaatgtgaaaaagacatatttcagattatgtaacagatacacattttcccaaataaatgttgtagaacaccatctgcttgatatttgagtgcattcccacagaaataaatttctgcttctcttccttcattaatggcttatgacaaatttatgacactatatttcacaatagctataccaaaattttatgaccaaaagaggctgacaaaaatcacttggcatgctcaaattagacaatttatgtgactgtctcatttacaccaatcctccaccccttactgagaccccagcgactgaggagaaacagaaaaaatcactgtaggggaagatctctcacagaataaagctcaaaaaagagttcaagacaagaagttacagatccaggtgccattttcagctcaggttttccataatcttcagcttatgcagctacccaaaattctgaatttaatgt

SEQ ID NO: 763 - DNA, 372 bp, Homo sapiens
accattttgtaaaaggaatattattattattatttttaattatttggtaaatattttgtcatatgaccttctgaagcagccacaacttagataatgtcagaactaaggtgatttttttttttttttaattttgaaagcccagccaaaatgaggtgtgaatttgtcatactgttacattgaaattggtaacaaaatatatcccctcccatttggacttttagggtaaatgaaaattttattgtattttaaagtagtttctaagtgttagcaagactgactataattccagtttctgttttctatggacagacctgataaactggagaccctaaagcaggaatacccaaattatagtgtcaggattttagctgt

SEQ ID NO: 764 - DNA, 220 bp, Homo sapiens
  misc_feature 205: n = A,T,C or G
acgggttgttttgggtgaatcttgaggaataaatgcctttatatttcacaggctgtaaattgaacttcccacacgattagctttattatggcttgtgaactgctggagtctggctttacctttttgtatgtgaacaaatcaaattgcttaaaaaagagttttctttagtatagccacaaatgccttgaactgttgtctgggattntttgtggggggaggg

SEQ ID NO: 765 - DNA, 271 bp, Homo sapiens
  misc_feature 123, 188, 233: n = A,T,C or G
gtacaagctttttttttttttttttttttttttttgatttaattcttcagctaaaacagcggaagaggtgatttattatatggttgttacactcggccacaaataaacacagaaatagtccanaatgtcacaggtccagggcagaggaccaacatgggcattttgtttatgagcaaggtgggtctcanaggtgatcggcgatcagagggcgatgaagttctagatccattganacaagctctagacagtagcatgcagtcccacaacttgt

SEQ ID NO: 766 - DNA, 376 bp, Homo sapiens
acccagtttggggagaaaattcacaactttgggctgatccaggagaagctggcacggatggttatgctgcagtatgtaactgagtccatggcttacatggtgagtgctaacatggaccagggagccacggacttccagatagaggccgccatcagcaaaatctttggctcggaggcagcctggaaggtgacagatgaatgcatccaaatcatggggggtatgggcttcatgaaggaacctggagtagagcgtgtgctccgagatcttcgcatcttccggatctttgaggggacaaatgacattcttcggctgtttgtggctctgcagggctgtatggacaaaggaaaggagctctctgggcttgcagtgctctaag

SEQ ID NO: 767 - DNA, 220 bp, Homo sapiens
accttaatccttaaaatatttagtgacccttgccttctaattcttgacacaaatatataatgaccattttagatcggggaactccctttctttgaaggcagtttagggattccacagatgggctttgaacctgctaaatgtgtatggaaaactgagtgaattacaaatgtctttttctcaaaagtgcgtttctggtttctgtcagattcaacaggtctgt

SEQ ID NO: 768 - DNA, 469 bp, Homo sapiens
accttttcttcccatcaaaaatgcattaacaagatcatgcttatagttagtcagcacaagaaaaaaacgacaatttatactgaactatttaagtcttgcagtagagtgctcacaactccgagctgtatctgttaaccttttcaatagcattcattatgtgacattgtcaccaattacagtaaaagaacttcactaatttttgaaagctagaattactcaaaaaattctgcattgtaaataataccaggaatattgcatttaagcctaggatggcaaaattacttaaatcttttctatacttttttgtgtaatataggtaggaaaatgaatactatataagagaatgaaatatatcaagttcttatatttttacctaagaggctatttattttaaggaaagttgattaatatttaaatgattaaaaaataaatcaatgttaagtattaactgcacaaaatctaaaaaaaa

SEQ ID NO: 769 - DNA, 498 bp, Homo sapiens
acaatctccttgaatgcccacaaccacccagcaaagtggttctcccgtgagccccatgttacagaggaggaagtatttgctttgagagatgaagttacctgccaatggtcaaacagctggacatggttgttggggagaagaagccagatctttgactaccaagcttttccttcaaccactaaacaaagctgctcccttacaacccaggcggatactgcctcgtccaggaagccctccctgacccccaagcatgagccaagcatccactaggctctcccactccagccttgtccattctgggtcatcaccgtgggggacttgtttgtcatccccagtgggctgtgagccccaagatagcagacctgaggctgtcactgtcatgactgtgtccccaggaccgcctaccactgggccgggcataaaagaggcactcgaggaagtgtttgctgagtgattcaatgtgtcagctccagagccagactgcctgtatctgggccc

SEQ ID NO: 770 - DNA, 466 bp, Homo sapiens
actacctacgatggaaccacacccctgcatatagcagctgggagagggtccaccaggctggcagctcttctcaaagcagcaggagcagatcccctggtggagaactttgagcctctctatgacctggatgactcttgggaaaatgcaggagaggatgaaggagttgtgcctggaaccacgcctctagatatggccaccagctggcaggtatttgacatattaaatgggaaaccatatgagccagagtttacatctgatgatttactagcacaaggagacatgaaacagctggctgaagatgtgaagctgcagctgtataagttactagaaattcctgatccagacaaaaactgggctactctggcgcagaaattaggtctggggatacttaataatgccttccggctgagtcctgctccttccaaaacacttatggacaactatgaggtctctgggggtacctgcc

SEQ ID NO: 771 - DNA, 183 bp, Homo sapiens
gaatctgctgcagcagacgctggctttgctctctttgagaagaagggagccttagctgaaaggcagcagctcatcccagaattggtgcgaaatggagatgaggagaatcccctcaaaaggggtctggttgctgcttacagtggtgacagtgacaatgaggaggagctggtggagagacttgag

SEQ ID NO: 772 - DNA, 231 bp, Homo sapiens
actgcctatttggggtatcatcattcttcgggggccccacagggaaccttttgctcaccggggccagcttgtcagtctcctgagagctgccttgattcaaatgctctttgatggcctgctcaatttgttcctcttcctgcaggtcatcttcagatgagccttgaccaggaactcgcttcacttggtttgaattaatgatctcagggtatttaactagcatcctggccaagt

SEQ ID NO: 773 - DNA, 426 bp, Homo sapiens
  misc_feature 412, 418: n = A,T,C or G
accctgcagcctctgcccctcagactgcagtcacattgcagcagagccccactcgccccacagcgggatgagacggggtggacccagggcagcaggaaaggggggctctgaggtggtgttctttctggcctagttattgcttttattattagaaaacataaatatcctggaatgaagagtcagcattctggccacaggcgtcaggtcgcttgtagggtgggtggtggggacagaattgggctcagctcagatgtcttcctaagatggtgtaaaatggcacttgctgaaaattattttaggagcacagcagtaatttttaaaatgttccgtcttgtggtagccggtcaggtgacagatggtgccatcgccacacagtggtgaagtaaaaggttcaaaacccaccttgctttgnctcctngctccagg

SEQ ID NO: 774 - DNA, 408 bp, Homo sapiens
  misc_feature 54, 77, 86, 122, 207, 241, 313: n = A,T,C or G
acaagcttttttttttttttttttttttttttttttcgggacaaagtctcgctntgttgcccaggctggagtacagnggcacaatnttggctcactgcaacctccgcctcccaggttcaagnggttctcctgcctcagcctcccaagtagctgggattacaggcgtgcaccactacacttggctaattgtttttgtatttagtaaanacagggttttgccatgttggtcaggctggtctcnaattcctgacctcaaatgatccacctgcctcggcctcccaaagtgctgggattacaggcgtgagccacggcncctggcccttggctttaacattttttgtgagcaatccaagcaaatgccaatctgcagggctaataaaatgccctgaaaatagctgtcacatattt

SEQ ID NO: 775 - DNA, 381 bp, Homo sapiens
acatgcctataatcccagctactcaggaggtgaggcaggagaatcacttgaacccgggaggcagaaattgcaatgagccaagattgcaggactgcactccagcctaggcgacagagtgagactccatctcaaaaaaaaaaaaaaggatggacaagacaaatctcttgtaaaaaaaattacaagtaatttttatagaagctctgccctgagggagggggagcgtgacttctcactccttcagtgtgggctgcacaagtgacttccttccatatgggatcgttataacaaaagactgtaacaagggctatgggagttataagacaggaattgtggacaaaaaccagtgtatatcataacatcacaccttgtaatgttggcagt

SEQ ID NO: 776 - DNA, 389 bp, Homo sapiens
acaagatctagagtttttccttagactctttagtcttttctgaattaaagaataagtgctcttaaatccatattttatcctgtcaaagtctgaaatgtgttcattgatgatttggtgacatctaaaaaattgtatttagttggcttggctcacccctcttaaaaatacttagccatctcttggtgggatgtggtgggggtattaaggtctcagagttatttattttctcacctaatttcaaacctttataaacttggggttttgttgttgatggtggtagtattttttgttaagttgtttaaaaggctgacttgattggagcctcctctactttttcttgagggttgcaagtattgtatggtgggggaggggggccttaggcaaactgt

SEQ ID NO: 777 - DNA, 506 bp, Homo sapiens
tcgacttggattacagaatgacctcttctccttggctcgagctggaatcattagcactgtagaggttctaaaagtcatggaggcttttgtgaatgagcccaattatactgtatggagcgacctgagctgtaacctggggattctctcaactctcttgtcccacacagacttctatgaggaaatccaggagtttgtgaaagatgtcttttcacctataggggagagactgggctgggaccccaaacctggagaaggtcatctcgatgcactcctgaggggcttggttctgggaaaactaggaaaagcaggacataaggcaacgttagaagaagcccgtcgtcggtttaaggaccacgtggaaggaaaacagattctctccgctgatctgaggagtcctgtctatctgactgttttgaagcatggtgatggcactactttagatattatgttaaaaatattctgcattcagtatgtgctgcttttgcagttaaaagtgtgaagatgca

SEQ ID NO: 778 - DNA, 412 bp, Homo sapiens
ggagcgtcgacgtatcctggaagtagaaggctttaagacagatattaaagttctccgacagaaactgaaagacttggagcaaatgttgtataaggtaattgctggtcctgaattgccacgagggagagaagaggtgtaagtgagggaacatggtcacgagggcccctgaaaagaaggatgtgctgtttccctgctggtaaacactaacagatcaccatcttcaagcctccctgaaaattagttcaagaacatgctagagggaaaataaaaagaccctgaaatcattgaacgactgcatcattcatacttcgatgtaagctaaacagattgtcatccctcctaattcaagaagtagattaaagaatcgtgtctgtcttacagttggggagggtgagtaattgagtgatagagt

SEQ ID NO: 779 - DNA, 459 bp, Homo sapiens
acacaaaatacacttgcaagcttgcttacagagacctgttaaacaaagaacagacagattctataaaatcagttatatcaacatataaaggagtgtgattttcagtttgtttttttaagtaaatatgaccaaactgactaaataagaaggcaaaacaaaaaattatgcttccttgacaaggcctttggagtaaacaaaatgcttcaaggctcctggtgaatggggttgcaaggatgaattgcattttataggtaaaatggtatactgactcaaatcattatggctataacaagcttcatttatttataatcttcaatgaaaataagttgattctttggcataatactataaggaataaaaggacccataccacccactggctttatctagagtgggagatagtagtaggggaactgtttataatgtaatttgtctaagtttattcctcttagaaaagcg

SEQ ID NO: 780 - DNA, 273 bp, Homo sapiens; identical to SEQ ID NO: 745

SEQ ID NO: 781 - DNA, 183 bp, Homo sapiens
actggttgcatcatcctcatcctcagagctggcttcacaggcagtgtggaagagctgcatgagttctcgaaaacggtgggaaacctcagcaggggtcttattttccagctgctgggagatgatgttgaaggtctgtggctgtgccccttgctcctggcacatggtgaggatcacacggtcagc

SEQ ID NO: 782 - DNA, 318 bp, Homo sapiens
actctagtataatatcacttcacgacaaaagatgtgaattggaaaaacagtttagatcacaagaaccataaaatgtcaccaggctcacacaatcatttaagaaataaaaacacatacacaaaaatgtaggctgcccctacaatctaatttatgataaaataagatgaatttcagcctaagaatacttcatttattttcttagttgtgaaaaaattagttaagaaccttaaaaagaactttttactctagccagatcttttaatttcctagaacatactctaatatactagttttcctaagcttgaaacaaatcacagt

SEQ ID NO: 783 - DNA, 90 bp, Homo sapiens
acagggttcttcctccctgatcttgcgttttgttagggctcggctgagctattaaatttgccttaactctctgcgggctgccatgctgat

SEQ ID NO: 784 - DNA, 338 bp, Homo sapiens
actaggagttgaacagctactacggtcaatgtattttggcagtcagctgtgtgtggtgtgtgctttttaaggcttcactcaataaaacatctgttgctctctgctgatgagcaaaaaacttgctatacgaaggacaaatatatgtatacaaacaaatgcacacgtgtgcatgtctatatacatatatgcaatttcagggaggtgacaccttattctgagaggtcatgagactccacttcaaaccataatagtaaaacctttagtaaactgaactcaacatattacagccaccatcatcaggaaaaattaaagactcatagttcaaataaagtgtacaa

SEQ ID NO: 785 - DNA, 249 bp, Homo sapiens
actatttgttttaccactgattgcactattttgtttttttaacagttgcaaagctttttaatgcataaaagtataattgaaatctgtggtatttatttacaaacatgtctacaaaaatagattacagcttattttatttttagttaaatctcttaatacacagagaactcccaatcttgctcatctaaataaggaaagacttggtgtatagtgtgatggtttagtcttaaggattaagacatttttggt

SEQ ID NO: 786 - DNA, 513 bp, Homo sapiens
accttccaacaccatgtcagggccggtctctgtgaccaataaatatggcagaagtaatggtatgtgatttccaaggctaggtcacaacttggatcactctgggaaaagccagctgccacatcacaagggcactgaagtcacactatggagaggtccacagcctgagaacttgaggcctcctgctgacagccatgtgagcgagccatcttggaagcggctcccctagccccaatcatgccccagcctcacattttgactgcaatctcatgagatgctatgagcctgaaccacccagctaagccactcccctatctctgactcacagaaagtgtgtaaaagaataaatgtttaaactgtaagacactaaggtttggagtaaataacagagttatccaaatctgatcatgagggcagttgcatgtcatctggcttgcacacactttcttcctgcaggaacactcttccctgccccatccttgccacatggggatcactactacccacagtcctagt

SEQ ID NO: 787 - DNA, 460 bp, Homo sapiens
  misc_feature 161, 190, 301, 316, 317, 380, 397, 398, 420: n = A,T,C or G
cacattccaagaaacttttgactattttgttcattaatgatgtgtctataaaaatgccttgcacatagttgttcaataaatattagttgagtgtattaataaaggataagacagaaaactttaaaactgagtagcaaaagacaagattgaaaaccaactancaaaaaatatttagagcaaataatgcatntcctaatatgtaaagatcttacatatcaacatgtaggacattaacaccttttagtgagtgaagaaagtgaccgaaaagataaaatggctaataaacatgaaaaagttttantcttgctagtcaganngaaatgtaaatttggaaggtgagactactgtttctcatctctcaattaggtgagggtaaaaantaatttttcttggtcannggtgtagcatgatgggagtgtnaattggtgcatacttaaaagtgtcaaatgttcctaccctg

SEQ ID NO: 788 - DNA, 441 bp, Homo sapiens
acttctgtttctcagtttatctggatgttatcagatcacagaccatggtctcagggttttgactctgggaggagggctgccttatttggagcaccttaatctctctggttgtcttactataactggtgcaggcctgcaggatttggtttcagcatgtccttctctgaatgatgaatacttttactactgtgacaacattaacggtcctcatgctgataccgccagcggatgccagaatttgcagtgtggttttcgagcctgctgccgctctggcgaatgacccttgacttctgatctttgtctacttcatttagctgagcaggctttctttcatgcactttactcatagcacatttcttgtgttaaccatccctttttgagcgtgacttgttttggccccatttcttacaacttcagaaatcttaatttaccagtgaattg

SEQ ID NO: 789 - DNA, 426 bp, Homo sapiens
accactcagtgctaccatccccacccctacaccacttccacacaggggcctcatggcatggtcagggtcccagctgtgggtgagagcagggcactgtccagctgtccactggggaagtcaagatgtcctaaggcccaggccagggcatctggagtctgaaggaccctagttcctagaggcatctggcagcaagaaggtgaggcatcagggaacgggaatcaggctgggactgatcagaggtgaagggacagagagaggagaggaggaagattgagctgggggcaacagccaagctcacctgggcaggtctctgccacctccttgctctgtgagctgtcagtctaggttattctctttttttgtggctatttttaattgctttggatttgttaaatgttttctgtcttctgttaagtgtgttttctc

SEQ ID NO: 790 - DNA, 77 bp, Homo sapiens
actgaatgacagactattactacgtttgccagttttaaacagctttatttatgttcatgtcctgtaaatttttaagt

SEQ ID NO: 791 - DNA, 458 bp, Homo sapiens
attataatgtcgaactctgaaacaaaagtatttaacgacccagtcaatgaaaactgaatcaagaaatgaatgctccatgaaatgcacgaagtctgttttaatgacaaggtgatatggtagcaacactgtgaagacaatcatgggattttactagaattaaacaacaaacaaaacgcaaaacccagtatatgctattcaatgatcttaaaaaaaaaaaaaagacgtttttaaaacgtagaggatttatattcaaggatctcaaagaaagcattttcatttcactgcacatctagagaaaaacaaaaatagaaaattttctagtccatcctaatctgaatggtgctgtttctatattggtcattgccttgccaaacaggagctccagcaaagcgcaggaagagagactggcctccttggctgaaagagtcctttcaggaaggtggagctgcattggtttg

SEQ ID NO: 792 - DNA, 308 bp, Homo sapiens
  misc_feature 282, 298, 300: n = A,T,C or G
accaaggcgtttttcaaaattaaagacggtgcagcattgcatattttaataaaggaaacaaattttgtttcaaagaggtctgaaattttaaaatcagaccaaccagtgggtagatggaatttagtagatagttttaaaacaagcagctggttcaaatggagagctggccaaaaaaatttatgttacgcactttacttgctccaaaatgtcaggaaattgtgtgttattcacaaatgtatgccaatatggctgatggtcctttaaatgatttttattttcttnccgggtctctggcctnantttcccag

SEQ ID NO: 793 - DNA, 303 bp, Homo sapiens
acttcagctgacagagagattcagagaacgttaatggagttactgaatcaaatggatggatttgatactctgcatagagttaaaatgatcatggctacaaacagaccagatacactggatcctgctttgctgcgtccaggaagattagatagaaaaatacatattgatttgccaaatgaacaagcaagattagacatactgaaaatccatgcaggtcccattacaaagcatggtgaaatagattatgaagcaattgtgaagctttcggatggctttaatggagcagatctgagaaatgtttgt

SEQ ID NO: 794 - DNA, 318 bp, Homo sapiens
acacttctggacagctcaagtggagccaaaattttggagcaacaattctataagtatcagccacagcagcccatggcaggctgtcaccagaaagggtaacgttcatgctttcttggttacagtaacacatcagggggatatcttctaacactgtcagttaaatgacaggggttatacaaaaccatagatgtttccaaacaggcagggactgtagaggtcaatgaagaactcttgtttgtgtggctgagctcattaatcttcaaccagaaaacaaaatgacagtgggaacaagctaccatcagacatggttcatgtagt

SEQ ID NO: 795 - DNA, 490 bp, Homo sapiens
caatatgcaaattagttttagattagagagtgcagccattttgtgatctggtcagtagtggaattcgattttatgcagactggatgtaatatttgtaatccctgtgcaattttgtgacgtgcggttctaattcatgtgcagtgatatagtatagataaaagaatgagtaaaagaaaatacaagaattctaaagaaagttggttttagcccctttgatagtccatggttaagacatcctttataaaccaaagatggccagcacactgctaaccagtcaccaaatgtaagacccataagaaacccatatttaaaaatctgaattttttagaagaatgcaaaactttagtaaaccctaagtaaagtcaaaatggagaaggggaaatatacagatggctagttgcataaaattaaattttacctttataagacaatggtgaaatctggcttgaacttgcttatgtgtttaacctataatattggggtcttctgt

SEQ ID NO: 796 - DNA, 503 bp, Homo sapiens
attaaaaattcactcaaaattgataatcttgatgtgaacagatgcattgaggccttggatgaacttgcttcacttcaggtcacaatgcaacaagctcagaaacacacagagatgattactacactgaaaaaaatacggcgattcaaagttagtcaggtaatcatggaaaagtctacaatgttgtataacaagtttaagaacatgttcttggttggtgaaggagattccgtgatcacccaagtgctgaataaatctcttgctgaacaaagacagcatgaggaagcgaataaaaccaaagatcaagggaagaaagggccaaacaaaaagctagagaaggaacaaacagggtcaaagactctaaatggaggatctgatgctcaagatggtaatcagccacaacataacggggagagcaatgaagacagcaaagacaaccatgaagccagcacgaagaaaaagccatccagtgaagagagagagactgaaatatctctgaaggattc

SEQ ID NO: 797 - DNA, 505 bp, Homo sapiens
actcagaaatgataaattctataatgctatactagttaggtagccatcaccacctgaaactgctaatcagaaaaatcaagagggctgggtgcagtggctcacatccgtaatcccagcgctttgggaggccaaggtagtagcatcaccggagaccaggagttcaagaccagcctggacaacatagcgagatcctgtctaaaatcctggctaaaaaaaaatgtttttaattagccaagcggtattgtcacatgtctgtagtctcagcttcttgggaggccaaggaggatggatggcttgagcccaggagttcaaggctgcagtgagccatgatcacgccactgcaccatagcctgggtaacagagcaagatcctctctcataaaaagaaaaaacaaaaatcaagagtattaatttctttcactaacccactactatggaaggacagtgccacctttcaatagcaatcaatggaaacatttatttacaccaaacagaaatggagtttc

SEQ ID NO: 798 - DNA, 246 bp, Homo sapiens
ctccgcataagcctgcgtcagattaaaacactgaactgacaattaacagcccaatatctacaatcaaccaacaagtcattattaccctcactgtcaacccaacacaggcatgctcataaggaaaggttaaaaaagtaaaaggaactcggcaaatcttaccccgcctgtttaccaaaaacatcacctctagcatcaccagtattagaggcaccgcctgcccagtgacacatgtttaacggccgcggt

SEQ ID NO: 799 - DNA, 504 bp, Homo sapiens
actatgctctattgctatatatgctatctataaatgtagatgttaaggataagtaattctaaatttattattctatagttttgaagtttggttaagtttcctttcactcaattgatttattttgttgttaatcaaatttatgttaattggatcctttaaatttttttttggcattttccaacaaaaatggctttattcataagaaaggaaaaaaatcaatggaatttgatatctaaagaagttagaaagggagcaaaataaaaaacataaaggaaatagatgaattagtaagcaaatcagtagtcgagtttttcaaactggcaaaattaattaattgacttttagcccaaatttacattgttaattaaatcaagaaggaagaagatctaagagctcccattgataggcaagcctagagagaactagctaaatttatcatgctaggatattgaaacacagaaagtttacatacatttatgaagggtcaatttagtttggacagtg

SEQ ID NO: 800 - DNA, 152 bp, Homo sapiens
actgaatgccgctatcaccatggggatggttcttctaaatgaagcagcaacttcgaaaggcgatgttggaaaaagacggataatttgcctagtgggattgggcctggtggtcttcttcttcagttttctactttcaatatttcgttccaagt

SEQ ID NO: 801 - DNA, 407 bp, Homo sapiens
tttttttttgaaaaagtcatggaggccatggggttggcttgaaaccagctttggggggttcgattccttcctttttgtctagattttatgtatacgggttcttcgaatgtgtggtagggtggggggcatccatatagtcactccaggtttatggagggttcttctactattaggacttttcgcttcgaagcgaaggcttctcaaatcatgaaaattattaatattactgctgttagagaaatgaatgagcctacagatgataggatgtttcatgtggtgtatgcatcggggtagtccgagtaacgtcggggcattccggataggccgagaaagtgttgtgggaagaaagttagatttacgccgatgaatatgatagtgaaatggattttggcgtaggtttggtctag

SEQ ID NO: 802 - DNA, 469 bp, Homo sapiens
cgcttttaattgtatagattaaaataactttggacaaaaattaaaactcaggcagagaatgttttttttttcaacaacacaaactagcaaaaacaaaggcacagtaaatattgaggcagaaagtttccagcgtagagatatgaatataataatagacacaggcagggatgattaataaatgataaaatgtttacaggatgatcatcggaatacaggacatttctacttttgaaaaccaccctcccaaatacttcattataagtaaggtgtctctaaaagggacagatctcctagacccctccttaaccaagtaaccagtcctgatatcatgataatgctgatggacaaactagaccttctctgcccgcagatgggctaaggttggaaactcacagcattgtctctgcagtgttcccggcaaaacgtttaggctgaatttaatcatgaagacattttcagacaacttcag

SEQ ID NO: 803 - DNA, 402 bp, Homo sapiens
  misc_feature 119: n = A,T,C or G
actgacagtttactgatagtgaggagtttacaaaggtgaacagtctagtatgattaaagatgcgacagaagtttttaaaattattgccaaataagctgcttttctaccattaaaaaaanttcctcaactcagattttaaagttttaaatgccaagttaaaataattatgaatctactgttccctagttccatccactacctatttcggatctgggttttgcccttaaacgcctattctatcagaatgaactgggtcaccacgccctatttctttatgttcctcttgacatttactccatgttttctttttctaaataagctttctctttctgttttcaaaattgaatactttctcatcttagccaagcacctattttcactctttcttctgctagctaataa

SEQ ID NO: 804 - DNA, 51 bp, Homo sapiens
actccacaaaacactacagacagtaacaaaataattcaataaatattaaaa

SEQ ID NO: 805 - DNA, 512 bp, Homo sapiens
acacaaagggacaaggcaaatttcttttttcgtgtgggtagacttagttggcccaagtccttaaaacttttccatataaaaataaaaagtccaagaccagattatttttcttctggtcataaatgctgatttatttacaggtgccttgttcagaccaccattataaacttgggataaaatatgtgtgtattaaagcctcagcatttaatgtcagggtcctttgaagattcactcaagtgttaagacgtttctggaatgcagcgtctctcccccatagtcaacatggttattatatctgtaatctatccagaatgatagaagctaaccttccaagtaacactttgtttttaacttaaatcttttagacatgaaagactccaaaatgacttcattcttgttctaaaaccagcactggagccagctgttgaagagtggtttataaatacagttatcttgtaggctgcttatctgtttataatacagcagacacagatggcagactttgctacatg

SEQ ID NO: 806 - DNA, 492 bp, Homo sapiens
acgcaaatgcacgcttatccagtgtatattagacatttttgtgctaaaatatattaagtgggatttttgtagcaaagcattctatttttctgttcttacagtgtgtgtgtgtgtgtgtgtgtgtatgcgtttttttaaccttaacttcagtttaaacactggtgtatttatttttttaagcaacttgactcttagaagccttagactgattttttcaataaatattcaaccaaaaattataaatttattaagatgtggccttacatatggcattccttgtgttcgtaatgtgagatttttgatttagataaatcaagattcaggattaaagtttcattgtaagttgaaatagaaaatgtattaaaatgtctaggcttctgggaggaagttcttatactcttctttcttggcattagaaagaagcaatatgaatttttgtgaatattctaaatattcaggcaacactgttcagattgatttaaggtttgtctt

SEQ ID NO: 807 - DNA, 316 bp, Homo sapiens
acacagaaccttcttcactcccaacaacaaagttgttgacatctccaacagggaaggacatagatgtcacagctactgcttttgactgtttatgaaccaactccatgctatcctgtggatgggaaagcatgtccagactccatgaacaaatttttccatcagtagagatgctaatcagattgtgagcattttgtgttccaacaacatttacacaatatacagggtgtgtgtgtgcagctgctgacagtggagttctttgcactggagttcttttattgctacggttatcccaaagcacaatttggcctgaatatgt

SEQ ID NO: 808 - DNA, 301 bp, Homo sapiens
acaatgtgatgttgatatatgtttaaaatgtggaatgattaaatcaggctaatttacttttttttttctaaaaggaccttggcttcagaattaactttaattttcattccactttgcttatattatcttggcaagatcagtcctttgtagcaaggccaggatttaagctttgaaccaccagtaaggagggcattggtttgagcctgctttcaattttgtccaaaatccagttattcgtattttacctagttcccagtaactcacaatacaatccaagaatgtgccttattgctggcctggt

SEQ ID NO: 809 - DNA, 270 bp, Homo sapiens
actgcgaaaatatgcaggaagattaattttgtggcagttttctaaaactgacaaccaggtgggaccaaagtttatgtgcctttagtcttaatttaccttgcattgtaatattcagttttaataaatcttcaaaatattttgtatttaggaatagatctgactttaataaaaacatggctcagaatctacaggtcaaattaatttgaacagttcttgtcaattcgaattgttgattctgtttaaatgaccaatactttttgaaattgatgt

SEQ ID NO: 810 - DNA, 115 bp, Homo sapiens
  misc_feature 21, 58, 59, 83, 84, 109, 110: n = A,T,C or G
agaagcaggcaccgccactgngactctggggctgctgggaatagcctctatgctagcnntgggtgtgtgtgcacgtgtggganntcacagggtatctttttggcctggnnttctg

SEQ ID NO: 811 - DNA, 404 bp, Homo sapiens
actttctctatttcccagatgcaaatataattaattgactttatttatctaggaaatattactcatatcttaattgtagtcattggcttgagtgacgggttttggtaattcaactactattacttgaaagtagtagatttcataggatactgttataaaatctttttaacctcttttctgatttcaggagtaattagtaattgtggtttactggaaaattcaatgaatagggtgttaaaggaagcaattcattaataatatatctaatctattgggagactgaggcgggtggatcacctgagttcaggagttcgagaccagcctggccaacatggcaaaactccgtctctactgaaaatagaaaaattcgccgggcatggtggtgcattcctgtattcccaggt

SEQ ID NO: 812 - DNA, 335 bp, Homo sapiens
actgagtattgataaactttgaatttttttaattgccttcaattgggagagaaagctttatatttgtaagaaatatatttgataaagtttcttaaagcaacaccaaaaaaacaaaagaaaagctaagtgaatttttgcacattctacacacagtgcctgtaaatctcatttgtattttcagtttgcccttaattttttttgttagtgtttagaaaacaatgttttaaacattcttcagtgttctgatttcttattaccccctttcctcttgggcttttgaactgtatttgatgttgctttgggataatgtttataagtcaaacataagatattgt

SEQ ID NO: 813 - DNA, 455 bp, Homo sapiens
  misc_feature 438: n = A,T,C or G
aaggagaagcagcggcgtcgctgcaagccaaagaagcccacccgccgtgacgcgtccccggagtccccttccaaaaagggacccatccccatccggcgtcactaatggaggacgccgtccagattctccttgttttcatggattcaggtgctggagaatctggtaaaagcaccattgtgaagcagatgaggatcctgcatgttaatgggtttaatggagagggcggcgaagaggacccgcaggctgcaaggagcaacagcgatggtgagaaggcaaccaaagtgcaggacatcaaaaacaacctgaaagaggcgattgaaaccattgtggccgccatgagcaacctggtgccccccgtggagctggccaaccccgagaaccagttcagagtggactacattctgagtgtgatgaacgtgcctgactttgacttccctnccgaattctatgagcat

SEQ ID NO: 814 - DNA, 448 bp, Homo sapiens
accacgtgcagatcaattaatgtgattcagtatatcaacaaatgaaggaaaaaaaatcacgcagtcatctcaaaagatacagagaaagcattttacaaaatgtaacaacctttattgataaaaatgcctaataatatatgtgtagaaagaatttacttcaacataatgaaggctgtatatgaaaagggcacagctgacatcacactcaatggtaaaaaactgaaagctttttctctaagatcagaaaaaaagacgaggatgcctactgttgacacttctattcagcatagcactagaagtcctagccagggcagttaggctagaaaaggaaatacgatgcatccaaatcagaaaacaaggagtaaaattctctcttttcacagatgacatgaccttatatgtagaagatcccagagacttcacaaaaattgttagaacttggagcagg

SEQ ID NO: 815 - DNA, 235 bp, Homo sapiens
acgaagcttacagaatgttttcacatatagcatctcatctgagcctcccaacagttccgtgaggtaggtattctcacctccctttttacagacagggtaaccgaggttcagagaggtaacgggatttactcaaggccacacagctagttagtggtaaagctaggaatcgatcccagcaccccatatccaagtccagtgtttcaacaccacagctacctctgtaaagtggagcgac

SEQ ID NO: 816 - DNA, 465 bp, Homo sapiens
acattcatgtagcatgttaaaaggagacaagtgccttggaaaaaatagatcagagtaagaggaatgggggacacaggtggcaatgtcaaatagattggttaggacaaccatcactgagaagatgacatttgagcaaagaattgaagaaggagagggaattagacatgtcagctgcttcactcactcttcaaaggcttaggtggatatgtccatcaggaccttggactacctaccacaccacttgcctcagggctccagaggtattaagtctggagctggccttcctcagtatctaccctgctttgcgaatggtaggatgatttagaggctccctaaattcaggctctaatgctgagcatttggagtggccctttgagctcttgaaaccctcctccccagggaacagcatccacatggtgacaggtctggaccccgagaagttgatcagcctgcacacagtggagc

SEQ ID NO: 817 - DNA, 364 bp, Homo sapiens
  misc_feature 135, 298: n = A,T,C or G
actcccacccctacagccagatcaccgtggaaaccgagtttgacaaccccatttacgagacaggggaaaccagagagtatgaggtttctatctaaagagagctacacttgagaaggggacttgtgaactcaaccncaatctcctcgagacattcatccagagaccatgtggcacttgattgaaaccccagaatgtccactgtcttttgtttagactctttatcaaaggtttactgttttcttccctgtatttattatatttaaaagtgaaataggtgtgggtttggatgtttcgcggnctcagccaaattcatgttacagcctcaattctgaaggcaggtggaagacttgcaaaatggcaaacc

SEQ ID NO: 818 - DNA, 514 bp, Homo sapiens
acttcttacattcactaactgccatggaggatcctaaacactacttcagcagcttcattcatagttatgaaggtgtctacttgcttttcttaagatttttgttttggcacagtaagggcatcagtggaagtatattctctatttataaaattgccatcacttctaacttaaaaacagtctgtagtaaaaaattctggagtgttcaatctagtctgaacttaccttagtgtgggaaagcaagttttcgaagtgataatttattttgagttactaatacaatagaaactagttttcttgatgggattcagtttgaggcagtaggttctgtataaaaatttttatcgtagatacaaatgtcacctgttttctagaaaaaaatattaaaagataacttaatgaatatgccaaactttataggtctgtatttttctttatataaaatgccctcaaatttaaatgtaattcccatatagcaataaagtccacatctctagattacctattacttgcatta

SEQ ID NO: 819 - DNA, 452 bp, Homo sapiens
  misc_feature 56, 58, 70, 75, 86, 109, 116, 125, 158, 193, 203, 216, 230,241, 285, 290, 351, 365, 407, 412: n = A,T,C or G
ctttttttttttttttttttttttttttttttttttttttttttttactttgaaananttttattggctngtaanacctttgcatntaaaaaaaatacccaaaacactntgcagtnttaaatcanaattacatttttttaccaattaaaactacccanaatatacattttttaaagaaaagaaaatcctacanaactgaattntgaaatgacattntgacttaaatactntgacaaaatanataattccttataacattaattcattgcacaaagctgccaggtnttttnataagcataaccgctgcaccgagtgcaaatgaacccaatttcaaagttacccatttattcnaaagaactgccccnccacctatggaacttttaaatttctggcccaaaatgttggtntgttntaacttccaccaggcaaccaactttgcaatccactaactt

SEQ ID NO: 820 - DNA, 487 bp, Homo sapiens
acccatcttgatggtgaaaatagtcatcagtgctgaacacaatgccatcacgattctgaccaagcagaattctgttaataaaagaaatcataaaggtgccatttacaaaatctataaccatcagaaataaaccatcagaaataaatataaccaagtgaaataaatcacacaggaaaggttattaaatggatttctgatacttacctgaaagtatatcacgaacagaccagcacaagagctgaataatcttacaaagatttcagatttcaaatcactttacacttaaatctacacaattacagatgctaacagaaactctttttttttttttttttagatggtctctgtcgcccaggctggagtgcagtggcacgatcttggctcactgcaacctccgcctcccgggttcaagtgattctcctgcctcagcctcctgggtagctgggattacaagcatgtgccaccatgcctggctaatttttgcatt

SEQ ID NO: 821 - DNA, 380 bp, Homo sapiens
acctgttgacaacctagaaaagatgagacattctaaggtgccctaacaatcttcagtctctaacagctgaacaggaaggccatttcactcaactgtgatgcgatcatcactgactggcatttagaattagatttcaagactccactcctgtgggggccactaaataactgaatacattttaagagcaatctacactgagggaaataacggttctaaggtattctgcaaagaaagagtatcgataatgggaactggcaactgagcatgctaaatcaaattccatgaatacagttttcataagatgtctttactacatgcattttgctaatatttccctaaaatattcaccaactctacagagttatactttgtgttaaggt

SEQ ID NO: 822 - DNA, 437 bp, Homo sapiens
actgtaaaataagatctgccctgacattaagaaaaaaggcaactgttaaatttacttttccctttaaataacgggattttttccttttctataagattagcaaaatatttcacaatacctatattttttcccttaaataaaaatgtatgcaaaattactataatagacattgctcaataggtgctggtaggtttatcagcacactcttcctcctttcattgaaatgcggagattcccttgaagttggatactcttgaatgcaccatggagtctttagaaagcaacggtgccaattattaagtattgcaggaaaattactttctccttgagagaggaagagtaacaacatttctatcatgctctgggtgttatttcaatgccaaataactatgaagcttggggtggattacagaaattatgagaataagaattatgag

SEQ ID NO: 823 - DNA, 395 bp, Homo sapiens
cgcctcaagcggaagaccattcctcaagaattttgtatccaaggcccaaaagtttgttacccaagatgatgaatgctgacatggatgcagttgatgctgaaaatcaagtggaactggaggaaaaaacaagacttattaatcaagtgttggaactccaacacacacttgaagatctctctgcaagagtagatgcagttaaggaagaaaatctgaagctaaaatcagaaaaccaagttcttggacaatatatagaaaatctcatgtcagcttctagtgtttttcaaacaactgacacaaaaagcaaaagaaagtaagggattgacacccttctgttttatggaattgctgctgatcattttttctttaaaacttggatagattccaaaagttacagt

SEQ ID NO: 824 - DNA, 294 bp, Homo sapiens
  misc_feature 168: n = A,T,C or G
acccttttttttttaatgaatagggaccaatgccacattgctttttatatttctttcttttttaatgttgccaaaaccaaaagtagctttgttttcctttgtattttgctactttgcagtatttgtgtgtgtggttttttttccttaatttgaaagggacagcactgngtatgtttataaactaaatgaagataagatattattttgtataaacattcatctgagaacaatcaaagcagtagccacatggtgctggctcctttgcagcacaaacctggtcattttgatgactgt

SEQ ID NO: 825 - DNA, 460 bp, Homo sapiens
tggacagatatgaagcaagcactgtaaaatattagtggtagtttttgtatgcccatactcacggcaccattattcacagtagctaagagatggaagcaatatgtgcccatcagtgggtgaatgatcaacaaaatgtggtatattcatacagtggaatattattcagcctctaaaaggaagatacgctgacatgtgctgcaacatggatgaatcttgaggacatgatgctaagtgaagtaagccagtcactggaagacaaatactctatgcttccatttatgtgaagtatctagagcagtcaaatgcatagaaacaagtagaatggtagttgccaaggactgggggaggaggaaatgaggagttgtttaatgggtatagtgtttcagttttgcaagataaaaagtcctgtggattggttgcacagttaagttatgtgaatgctgtatgccaactcaactgt

SEQ ID NO: 826 - DNA, 456 bp, Homo sapiens
  misc_feature 117: n = A,T,C or G
acaattaaaaggtcatctatctcataactgacggctcaggtctgtccagttgccataattgcacaactggattccagctgctggtaataaggaattgtgtagatagataaagggcangagtatgtctgcaatccaaaataaatgagagttaacacataattagccttttgattattttggcagctatcctcaccatttagtaaagggtatactaacaatacccaactttatttaacaaagttttgtaagcatacctaagtagtaacttgatatgctgaaaaatctgacctgtcacttcgcttcactctgaccagtaattgcagattgtcgtcaccatcctagcctatgactacattaggattttatgacttattaacttgaaaatctgttctgtaagtggcattggtagaatctcccactttgctcctcactgtccaattgtgtaaagattaaggt

SEQ ID NO: 827 - DNA, 444 bp, Homo sapiens
  misc_feature 397: n = A,T,C or G
acaattttgctgaactaaaactctaataatggcacctaaactgaatatttgaaaatgtcttggtaggcttaggacttatttttaatgtaaggatagcagcgtgccttagttttgagtaggtattcattacccccctaaaatagtggattttacttttcagtttcttgagttgtgtcttgaaattattgtttgtaaaaatgtttcttttgattttggagggaaaaaaaatcaaaaagttttagtgcctctgtctacttgtagatataaaacagatggaaaagaaaaggaggccatccttgaagaagaagatgacctctgggttagaattcgacatcgacatattgcggttgtgttagaggaaattcccaagcttatgaaagaatttcatcaaccaagnaaagcaacagaaggaaagacatcacttagtgctcttacccagctgat

SEQ ID NO: 828 - DNA, 364 bp, Homo sapiens
  misc_feature 189, 190, 330, 349: n = A,T,C or G
acatccttgaatgtgtgaggctctcattggtataagtttaattcctgactgtggatgaaagctttaaaactttgcgggcaaaatacagaatgaatttcagtgagttcccatgtattaaacaaggtggcgctggctggagacatgctgtccctgtgcccacaggagtagcagtgctgtgctcatcttccnnacccgctcttcacagtcttcaccgcctttcttcaggagtctcccctttggcttttccacagctatgaaacccacgtagtcggacaccctaatgcttctcctgtagggtgtgtgatgaggaggtgagcttggctttggagngctgggaacctgaggaatngccaaggacccagag

SEQ ID NO: 829 - DNA, 249 bp, Homo sapiens
acttactctaactggaaagaaaatgaacatggctattttcaaaacagtaataaacacaaaaggtcaacatacataaatcatgacaagtgtacttttagtagagacagggttttgccgtgttggccaggctggtctcgataatctgacctcaagtgatccgcccaccttggcctcccaaagtgctgggattgcaggcatatgagccaccgcaccaggccagaagttaatttctgattcccactctctgcc

SEQ ID NO: 830 - DNA, 418 bp, Homo sapiens
ctccccggccccagaggaacccacctgttttggagctcagcttggcccagcgtttccttggggaagggaaaggaggcctggacagcactgatccgggcaggcagcgtgtgcagcagtggccagccagagtgccaaagatgcacggggatgtggtgtgtggctccgggccctcgacatctctgctttgggggatttttaccttgtctgcacacttgtcaggggagaggggacagcaaggtgggaggttgaagagctttgaggctcagcagcatgtttgtggcattcggtggacaccatggccttgggcggctggacaggtttttgtgatgtgagggacacgcatggggcacatggtaagcttggcaagggctccaggaacgctgacgaagggttttaggacccccacccccatgcctgt

SEQ ID NO: 831 - DNA, 251 bp, Homo sapiens
accatgcgggtgatcctggaaccgttgattggagatatgcccttagttggagctttgtctatcttcttccttaggaaaccacttttagaaattgactggacaggactgacgaatcttctggatgtccctggattgaatggtttatcagatactatcattttggatataatatcaaactatctggtgcttcccaatcgaatcaccgttccacttgtcagtgaagttcaaatagctcagttgcggtttcctgt

SEQ ID NO: 832 - DNA, 469 bp, Homo sapiens
acactaccaaggaagctgctgtgtgcagccatcgcacactgggtccccatgaggaaaggaactcagtcggcttaattggctgcggagcatcccaagaaccactgaaaaggcgccactgggctcctctgccagcttcagctacctgctggcaagatggttgtcattcagctaaaagcaagaagagctactcccatcaccagtgtttcccctaacctgtggggaagagcttgctaagacttactcatgctttgtttgtatctgcaggaaggggtcctgagtgaccactgaaagtcacttgccagcctggcttttctagtagccatagtggctgagtcactggggccacctctatgctctgataaaataatgcaagcctaataatgtagagactccaactgccttaaaggcccagaccaagctcacctgtcagccccagcacaggacaacatcttgttgatgcggatgacgt

SEQ ID NO: 833 - DNA, 319 bp, Homo sapiens
acgtagaatgtttcaccctggccggggattaggaggtcctcgtgctcgtagatcaaacatgcactttactagcagttctactggtggactttcttcttctcagagttcatattctccaagcaatagggaagccatggatcctatagctgagcttttatctcagttatcaggagtgagacgttctgcaggaggacagcttaattcctctggcccttccgcttctcagttacaacaactgcagatgcagctgcagctagaacggcagcatgccctggcagcacggcaacaactggagaccgcacgcaacgcaacccggcgt

SEQ ID NO: 834 - DNA, 497 bp, Homo sapiens
  misc_feature 436: n = A,T,C or G
atcaaattaaatacagagaataggaagcatcttgtcagtgaacttttaaaaatctgatattggtaaaccactccccctacaacctgttcctgttcatgattgtttaggattattatttataacatttaggttatatactccccaaaaagactcaaactcctgacctcaagtgatccgccctccccagcctcccaaagtgctgggattacaggtgtgaaccaccacagccagccagtatgacctatcttaatcatcagctcaactgtaatttaaatttggctgttctctggagctaaaccattagggaagttcaaaggaatgtgccatgatttccgaatttgcacaagagaatgttttaagcattggtagcatcattgaataaaagaatagtttcctgatgtcactattttgaagtggaaattatcacttggatgtngaggttttactttttaaaacattcagcttaattaccttaccttaattaccttagttagata

SEQ ID NO: 835 - DNA, 515 bp, Homo sapiens; identical to SEQ ID NO: 730

SEQ ID NO: 836 - DNA, 440 bp, Homo sapiens
acccagaccctccaaatccctgtcctgttggaaaaacagatgatggatgtctagaaaacacccctgacactgcagagttcagtcgagagttccagttgcaccagcatctctttgatccggaacatgactatccaggcttgggcaagtggaacaagaaactcctttacgagaagatgaagggaggagagagacgaaagcggaggagtgtcaatccatatctacaaggacagagactggataatgttgttgcaaagaagtctgtcccccatttttcagatgaggataaggatccagagtaaagagaagatgctagacgaaaacccacattacctgttaggcctcagcatggcttatgtgcacgtgtaaatggagtccctgtgaatgacagcatgtttcttacatagataattatggatacaaagcagctgtatgtagatagt

SEQ ID NO: 837 - DNA, 440 bp, Homo sapiens
acgaaaacatgagcccccacgatgaggaaaaaggcgcatatcagagaaaagaaaaatgctgcgatgatccaatggcaggagcagcgcgcatccactttctttgtttttttgagatggggtttcgctctgtctcccaggctggagtgccgtggcttgatctcagctcaatgcagcctcaacctcccaggctcaagtgatcttcccatctcagcctcccaagtagctggaactacaggcgtgcaccactacacgtttactttttgtagaaacagggtctcacaatgttgccaaggctggcatcctgaagggcgggtggggcttcatcctacagagatgaaaggcagaagaagctcagagcccaaagcaaaggggtggaggacaagggcatcttcagaacagagtggctcggctgagacatccagtaggatgccaccaggcag

SEQ ID NO: 838 - DNA, 334 bp, Homo sapiens
  misc_feature 130: n = A,T,C or G
acggtagaactgctattattcatcctatgtgggtaattgaggagtatgctaagattttgcgtagctgggtttggtttaatccacctcaactgcctgctatgatggataagattgagagagtgaggagaangcttacgtttagtgagggagagatttggtatatgattgagatgggggctagtttttgtcatgtgagaagaagcaggccggatgtcagaggggtgccttgggtaacctctgggacccagaagtgaaagggggctattcctagttttattgctatagccattatgattattaatgatgagtattgattggtagtattggttatggt

SEQ ID NO: 839 - DNA, 520 bp, Homo sapiens
acacaccactgcacctggcctagcgctcaattttcctatctctgaaatcatttttcaaaaactgaaaaacacaagaaaaaggaaatataacaactgctctacttctctcacaaagctgtaattaagatcaaataatgtggaagggaactgccaattttaattcttttatggcactgatctcagggcaaccacatctgaatatcgtctagttggtagaaggaaaggattaagagtgggctcagggaaactgggattcaattcccaaagtctcatttaaaacagcagtgactggagctctcaatagtgtttcctggcagaaatagccaaggtggttcccaaggtaaaggctgccagtagttggtgggaaataaagagatgaaatcttgtcccctctatttcatgtgtccaacccaacagctcaacctatggatctttgaatatgacacttatgacaagaagaaaataaaacaccaacacacttcctgcagccctataaaccaagtagatcatttcaagattg

SEQ ID NO: 840 - DNA, 442 bp, Homo sapiens
  misc_feature 168: n = A,T,C or G
accatatagatcaaaagctttgtaaccacaggaaaaaataaactcttccatcccttaaagaatagaatagtttgtccctctcatgggaattgggctgtatgtatattgttcttcctccttagaatttagagatacaagagttctacttagaacttttcatggacacantttccacaacctttcagatgctgatgtagagctattgggaaagaacttccaaactcaggaagtttgcagagagcagacagctagagataactcgggacccagagttggtcgacagatgttagatgtatcctagcttttagctataaaccactcaaagattcagcccccagatcccacagtcagaactgaatctgcgttgttgggaagccagcagtggccttgggaaggaagccatggctgtggttcagagagggtgggctggcaagccacttcc

SEQ ID NO: 841 - DNA, 539 bp, Homo sapiens
acaacttaatggattagcttttgggtttaactgaatatatgaagaaattgggtctgtctaaagagagggtatttcatatggcttttagttcacttgtttgtatttcatcttgatttttttctttggaaaataaagcattctatttggttcagatttctcagagttgaaaaaggctctatctcagatgtagtaaattatttcctttcagtttgtgaaagcaggatttgactctgaaagaagctttgccaattttacttattcgtgatcaatcaaggaaaatctaataaattttaggccaaataagaatatagcatatttagtatggttatagtcaacacagagatcacaacttagaagaaatataaagaaatggccactccccatcccccacagtcctggagtaaatcaaaatcaatatatgattcttttaaacattaagtttgaaataggaatggttttctcaagaatagatttggtgtgataccttgtgtttgcttacattggcccactatatatacatatatatttatgtagatata

SEQ ID NO: 842 - DNA, 274 bp, Homo sapiens; identical to SEQ ID NO: 658
  misc_feature 24: n = A,T,C or G

SEQ ID NO: 843 - DNA, 414 bp, Homo sapiens
acttttgcttctgttccagaatccagattaggacaccccattacattggttgatttatgttttaaaatgtttgctctggctgttctgtggagaattagtgaaaggcaagactggaagcagggagtccagttggtaggctattggaatgatccagaccaagatggtggtttgagctggaaagatggcagaggataaagaggggaggaagggatctattttgaaaacagagtgactttctgttagaagtgatgcggggcatgagaggggaacaaaatagggatgatctcaggctttctagctctgcctagtgggcctgggtaagtggtggtgccattgccatcatgggaaacagtggaggagaagcaggttctgagaagaaagcaagagcgccatttagtcatgatgactttcaga

SEQ ID NO: 844 - DNA, 523 bp, Homo sapiens
actgaacactacatgctatgcactgctccaacatttttaagtgtcctaatttattaaactctcacacatttgaatagggaggtttcactgatcaggaaatagaggatcagagcatttaagtaactagctcgaggtcacagagctaataaagggaagagctaagattcaaactcagacaatctagcttcagaactgatgcttaatgtgtaaacatcctttctttcatgtccttcaacattcccatttcccatctgtaaccaaacatatggaaggcataaatttcttttatgggtcctaacatcaccacagagccctagataaatcttaagtaggtgctggatgatggtgaagcatattaaaaatggaggctggtggtaaagttgacctgatttcactactcagaagaacagagtgttgctttgaaagacagacataaaagaatgtagatgacaggttgatgagtgcagcaaaccaccatggcacatgtatacctatgtaacaaacctacatgttccgcacatgt

SEQ ID NO: 845 - DNA, 493 bp, Homo sapiens
  misc_feature 28, 29, 306, 401, 402, 416, 430, 460: n = A,T,C or G
actcagcaattcacagacatgacataannatgacatttttaagacataaacaaagactgcatgttggcagcataggggacagtcttgctcttcctcattttttgaagcagagatatttcatatttcatagtttctgaacttcctcaggagttctgagggagcatccttggaccagcggaaacgaaggtgccaaccattcacatctgcaaaacctgaagaatctgaattttgcggggagactgacttctctaggggcttgggttctttctgctccgttttctctgcggttgaagccagctcctcttnctttctttctctttgctcattacattcctcattttccatcttggtggtatgagtcttgtcagattcttccagcatcaggtcttttttacctctgnnaacccagtgcattnacgtcttcactgangtcattcaaagcttcccactgctggaatgncatcgacatctggctccttcgccagtggtcata

SEQ ID NO: 846 - DNA, 151 bp, Homo sapiens
acccgcattcacatcatgccttccctgaacccagatggctttgagaaggcagcgtctcagcctggtgaactcaaggactggtttgtgggtcgaagcaatgcccagggaatagatctgaaccggaactttccagacctggataggatagtgt

SEQ ID NO: 847 - DNA, 352 bp, Homo sapiens
acatcgaagagtatatgggttatacaatccacactctgaaactaaaggagactcattccaaaatgcttggttttgggttgggggtttgagaggggggctggtgctgggagggtaattttctcctaatacagaatatggaaatatttagatgagaagcagaatgactaaaatatcagtgatccatttaatttttatctccaagaatagaaaactgtattataggcttccaaaattaaagaattgatcaaaaatcgaaacacagaagagaagaaacaaatcctaagttcgatttgtgctattgttacaactgattagcacttcagacgcactgcatccaagtgtacctcggccg

SEQ ID NO: 848 - DNA, 314 bp, Homo sapiens
acctcttttacagaatgcagatcactgctaacaatccacatgactaagtcttcagtttcccttgcttaacatttgttagcatatatttcagcaaagattaacagtataatgaatgttgagtagtaaaatcctatttaattcgcttcaatttaaaaatgagatatgctgctatggggaacaaatgacctcttgagatttacaactccctttataaaagtgggaaagctgcctccctaaaaaaaattatgtccaaggttaataccgtatctttttttgtagttttcttatttcttgattttattggcacctcccag

SEQ ID NO: 849 - DNA, 333 bp, Homo sapiens
acttcatcaataagtttttgaagagtgcagatttttagtcaggtcttaaaaataaactcacaaatctggatgcatttctaaattctgcaaatgtttcctggggtgacttaacaaggaataatcccacaatatacctagctacctaatacatggagctggggctcaacccactgtttttaaggatttgcgcttacttgtggctgaggaaaaataagtagttcgaggaagtagtttttaaatgtgagcttatagatagaaacagaatatcaacttaattatgaaattgttagaacctgttctcttgtatctgaatctgattgcaattactattgt

SEQ ID NO: 850 - DNA, 427 bp, Homo sapiens
acaaagatggatcaacaaactattacattgcacaaaagcttaaaaaaaagaaagttcaagatgaaataatcggaaaaacaggaattttctcaagtagaagaaaatgctaagtcataaagagaactcccaagaggaaaatgtctgttttcctatacaaggggtagttaccctctgataagaatggtgacattattgctatgagaatcaaaaatagtatactcttagagggagacaactcttttcattcctccataaaagccaggaaaaaaaaaatctgtgactttcattatagcaaaagaaaatattcatataaaagctatatgttatttcctaaaaccagaatctattatgctcattaagcacacattttaattactacacactgctcaagtcttgatgtaatcttagaacaagaaagtggctttgc

SEQ ID NO: 851 - DNA, 275 bp, Homo sapiens
acaggcagatgaaaccaggtcacttggggagtctgcttcatttcctctgagctgttatcttgtgtatggatatgtgtaaatgttatgactccttgataaaaaaatttattatgtccattattcaagaaagatatctatgactgtgtttaatagtatatctaatggctgtggcattgttgatgctcacatatgataaaaaagtgtcctataattctattgaaagtttttaatatttattgaattattttgttactgtctgtagtgttttgtggagt

SEQ ID NO: 852 - DNA, 268 bp, Homo sapiens
actaggtgattggtctgcattcacagtgaccaaaatcagctatgtggccaggtaattcactgctgagggctttggattttcctttatgaactactgaaatgaggtcaacttgactattactaagggacattttgctacaaagaatgttagttttgccaattccctttccaaatctaaaatttattttaaccaggattttagatgtaaacatcaagtagttttggttgtttcaatgaagtaacatgtttaagctcacattatttgaagt

SEQ ID NO: 853 - DNA, 390 bp, Homo sapiens
acgttctttaattaagagtcgaaacaagaagtctgtaaagtgacagactgctgtgttttgagttatgaaaatgatttcccatatttaaatttccacaagtctagtgggttgcttacatagatgatcaaactaagaaacctgttacaggccgggccctgtggctcactcctgtaatcccagcactttgggaggctgaggcaggcggatcacgaggtcaggagatcgaaaccatcctggctgacacggtgaaacctcgtctctactaaaaatacaaaaaattagctgggcttggtggcgggcgcctgtagtcccagctactcgggaggctgaggcaggagaatggcatgaacctgggaggcggagcttgcagtgagcccagcgccactgcac

SEQ ID NO: 854 - DNA, 384 bp, Homo sapiens
ggaagcggcggcggcgcgatgaccacgctacgggcctttacctgcgacgacctgttccgcttcaacaacattaacttggatccacttacagaaacttatgggattcctttctacctacaatacctcgcccactggccagagtatttcattgttgcagaggcacctggtggagaattaatgggttatattatgggtaaagcagaaggctcagtagctagggaagaatggcacgggcacgtcacagctctgtctgttgccccagaatttcgacgccttggtttggctgctaaacttatggagttactagaggagatttcagaaagaaagggtggactttttgtggatctctttgtaagagtatctaaccaagttgcagttacatgt

SEQ ID NO: 855 - DNA, 480 bp, Homo sapiens
actgactgcaaatatccaggatcttaaggaagaatattctaggaagaaggaaactatttctactgctaataaagcgaatgcagagaggttgaaaaggctgcagaaatctgcagacttgtataaagatcgacttggactagaaattcgaaaaatttatggtgagaaattgcagtttattttcactaatattgaccctaagaatcctgagagcccatttatgttttccttacatctcaatgaagcaagggactatgaagtgtcagatagtgcccctcatcttgagggcctagcagaatttcaagagaatgtaaggaagaccaacaatttttcagcttttcttgccaatgttcggaaagcttttactgccacggtttataattaacatacaaatagtgtatataaaaacggtttatttttcttctctattacatatctctttttttcttgtttttattattattatactttaagttttagggt

SEQ ID NO: 856 - DNA, 564 bp, Homo sapiens
  misc_feature 118, 522, 542, 551: n = A,T,C or G
acagcatgtcatcgaagaccatgaacgtataggctatcaggtcactgccatgattgggcacacaaatgtagtggttccccgatccaaacccttgatgctaattgctcccaaacctcangacaagaagagcatgggactcccaccaaggatcggttcccttgcttctggaaatgtccggtctttaccatcacagcagatggtgaatcgactctcaataccaaagcctaacttaaattctacaggagtcaacatgatgtccagtgttcatctgcagcagaacaactatggagtcaaatctgtaggccggggttacagtgttggtcagtcaatgagactgggtctaggtggcaacgcaccagtttccattcctcaacaatctcagtctgtaaagcagttacttccaagtggaaacggaaggtcttatgggcttgggtcagagcagaggtcccaggcaccagcaagatactccctgcagtctgctaatgcctcttctctctcatcgggccagttaaagtctccttncctctctcagtccaggcatncagagtgtnaggtcagtccagt

SEQ ID NO: 857 - DNA, 545 bp, Homo sapiens
  misc_feature 487: n = A,T,C or G
acactttttcttgggggaagagttcttgtcttcagtttactgcagtagggttcctggctctgttacatgctcatgtgttccggaagaacatatgaaatatcatcccacggatgacgatacagcccctgcttcagcctcttctgatcaagatagtgtccaatgaaccccatactccttcccagcacaaagatgccattgagggctccaatgtcaatatattcatcagcttcctcccgagtaaaggacccacagtttctaagcatgtctacaaatgcgactccgatgagaccatctacattcaggataagatttggcttcttcgaggtggtaatcttctctacttccagtgcataatcgagcagaggagtggcagggaagtgctgcctgacgtaatctttgaggatctgcactcgcatgtctgggttgtttatcgacttcactcggtgaccaatgcccatgatcagcttcccttccttcttcatcttgntcacaaactccatggggataatgccactgtcaaaggctttactgaacatcttggctgc

SEQ ID NO: 858 - DNA, 455 bp, Homo sapiens
acattctctgaagaggaagcagctggttggacaggatttcttgaagagctaggtgctaagggcatcaggtcgacatccatagtaaccatgtgccataacatctacacatttccacttgttttacagacaaggtaacaggcagaaggaaaatccagagtcttgcagtaagcagatgacaaaacttcaatatgcttgggcaccacttaggtgaccccagggagatttagtgtggccttaggaaagcaaaagagcactttttattggaaatatgagcttgtcactgggaaagatttgtaaaattgatcaagaacttgatttataattatgcctcaaaaaaaaaagttctcatttagtagtggagcaatctagaaaacataccttttttgtttgtttggaagatcctctttccctggctgtattgtagtgtttgctatttgatgtggaaataactaata

SEQ ID NO: 859 - DNA, 218 bp, Homo sapiens
acatggagtttcccagataactttatctgcccttgccgtcgtctaatctaacctaggtagaaggagtcactttgtctcctttagactcaccttgtcattcagcacacactgcccatagcatgcagacagacttttgcacccgcatgggcacagagtcagttttcccaacaaaagtcctgatttggcactgcttttcagacagtaggagcttatggggt

SEQ ID NO: 860 - DNA, 364 bp, Homo sapiens
acagttcttccacgcatctggaaggtgcctgatgttgaagaagtaaatttatatcggattttcaaccgggtttttaatcgcttactctggagtcgtggccaagggctgtggaactgtttctgtgattcaggatcctcttgggagagtatattcaatcaaagcccggaggtgatgactcctttgcagctccagtgttgccagcgcctagtggagctttgtaaacagtgcctgctagtggtttacaaatatgcaactgacaaaagaggatcactttcaggcattggtcctgactggggtaattccaggtatttactaccagggagcacccaattcttcttgagaacaccaacctacaacttgaagt

SEQ ID NO: 861 - DNA, 256 bp, Homo sapiens
  misc_feature 157, 158: n = A,T,C or G
gaatcccctattttcacttccagatctgtcggctgccatggaggaataatagaaaaccagaaatgcgtgtagagggagatttctaaaacttcccttgtgtcgcccatagttgtagttttgggttctggcaggtggaacaccctgaaacctggaatcnntctatgagaatacagttcagactttgcagactccagcccatactaactgtcatgaagcttgacttcttgtcataatgcagccatcttggaggaaattg

SEQ ID NO: 862 - DNA, 465 bp, Homo sapiens
acttaaattctaatgttcttgagccatttgagaattagtaatttttaaacagacatattaatgctggagtgtagagaatatcattaaatatatcaaaaatatatcttttaagcctagaaaatggatgcctttggattaccttcatttcagggtagagaaaagcccttcctactgaattaggctctgaacatgtgatttctttccctaacactagtttttccaatctactaatttatttataaacaaagcaaagtaagagatatttttgctgttactttgacaattctctctctccaatccccaacatcccgagttcagtgcacatctaacaattcactcaagactaggcacctgacaataagtgtttacttagtgtgtaaagtgaacaagaaaagcagcataataaaggagctgtgtttttatcagaggagccttccttctgagttttacataagttgatgcctt

SEQ ID NO: 863 - DNA, 445 bp, Homo sapiens
ctcttgttttatgtccttgttcctaatgtaaaagtgcttaactgcttcttggttgtattgggtagcattgggataagattttaactgggtattcttgaattgcttttacaataaaccaattttataatctttaaatttatcaactttttacatttgtgttattttcagtcagggcttcttagatctacttatggttgatggagcacattgatttggagtttcagatcttccaaagcactatttgttgtaataacttttctaaatgtagtgcctttaaaggaaaaatgaacacagggaagtgactttgctacaaataatgttgctgtgttaagtattcatattaaatacatgccttctatatggaacatggcagaaagactgaaaaataacagtaattaattgtgtaattcagaattcataccaatcagtgttgaactcaacattg

SEQ ID NO: 864 - DNA, 335 bp, Homo sapiens
cctgttccgcttcaacaacattaacttggatccacttacagaaacttatgggattcctttctacctacaatacctcgcccactggccagagtatttcattgttgcagaggcacctggtggagaattaatgggttatattatgggtaaagcagaaggctcagtagctagggaagaatggcacgggcacgtcacagctctgtctgttgccccagaatttcgacgccttggtttggctgctaaacttatggagttactagaggagatttcagaaagaaagggtggactttttgtggatctctttgtaagagtatctaaccaagttgcagttaacatgt

SEQ ID NO: 865 - DNA, 338 bp, Homo sapiens
acgcccagcattggcggggaaaatattcctaggaatgctttaagagaagaggcagctggaagcttggcaatattccaaggcatgcccgtgctccctgggaagtggtctgtgtcatcctgccgggtgaaacctctgctattgcttgagcagctcccttaacccagtctggctggttctagacttcccagctgccggagaaagtgatacacttccagggaagcagctttccttgccttgcccgccctgcagctggctaaagtgcaggatgggaggatgactgagcattatctgcaggccccaatcacacttccgtggcactgggaactgcagttttcaac

SEQ ID NO: 866 - DNA, 399 bp, Homo sapiens; identical to SEQ ID NO: 566

SEQ ID NO: 867 - DNA, 524 bp, Homo sapiens
  misc_feature 201, 232, 324, 325, 430, 431, 454, 455, 476, 505, 506: n = A,T,C or G
acacattttcataagactctggatcttatttaaaattcctgttttagctggttgtttgaagactctgctgtatgcgggaaaagagcagagaatcaggtgaaagtgctgacttgtttctgtcaggtggaggtaaaattatatgttccctactcaatctctgttgacacctgggaaacagggaagattctcattactgatatntggaagcaggagttctggcttcctatgtgangttcactgacacagtcgtaagggtgacctcactactgctgggtgatggtaaaagtcccaattctccatgaggcctcctctgaaatgactccnntggacagcaggtgcctcagtaatattggtggcgatggaattctacatttcccatgtagtctccactgactcttgggtgtgaatgggagactcattaccaactggnngacatgaaagtcttggatttctnnttggccttctctggcactatntgatactagcccagtgtggtgttgggggnncctcattacagcctcatg

SEQ ID NO: 868 - DNA, 440 bp, Homo sapiens
gggcaggagagagccacagccctcaggccagtgtggggacaccactcccagggccatagaggggtccccagggtgtcttccctcctctagccccgggcctgggagactctcaacatgggagtctctggacctctctgtggtggccccacaggccacattgcccttctccttttctggaagactcagggccccagaggtcctgtcctagaccctctccttggccatctgccaatgagcccaggcttggggtccctcaggagattggggggagggtagaagatccttgcagggggaagcaatggtcaaaaaagggtgtcaaagccaagggtcaagggtgataccaatgtcatcttactaacaataaaaataacaatagctcacgagaatcgcagccttgctgtgtgccagggaactgtgccaagtggtttacgtggattggc

SEQ ID NO: 869 - DNA, 460 bp, Homo sapiens
actacgttgtagctcacttccactatgtcctatcaataggagctgtatttgccatcataggaggcttcattcactgatttcccctattctcaggctacaccctagaccaaacctacgccaaaatccatttcactatcatattcatcggcgtaaatctaactttcttcccacaacactttctcggcctatccggaatgccccgacgttactcggactaccccgatgcatacaccacatgaaacatcctatcatctgtaggctcattcatttctctaacagcagtaatattaataattttcatgatttgagaagccttcgcttcgaagcgaaaagtcctaatagtagaagaaccctccataaacctggagtgactatatggatgccccccaccctaccacacattcgaagaacccgtatacataaaatctagacaaaaaggaaggaatcgaaccccccaaag

SEQ ID NO: 870 - DNA, 493 bp, Homo sapiens
gggaaacaactatagaaaactttcatgtggtggaaacattagctgataatgcaatcatcatttatcaaacacacaagagggtgtggcctgcttctcagcgagacgtattatatctttctgtcattcgaaagataccagccttgactgaaaatgaccctgaaacttggatagtttgtaatttttctgtggatcatgacagtgctcctctaaacaaccgatgtgtccgtgccaaaataaatgttgctatgatttgtcaaaccttggtaagcccaccagagggaaaccaggaaattagcagggacaacattctatgcaagattacatatgtagctaatgtgaaccctggaggatgggcaccagcctcagtgttaagggcagtggcaaagcgagagtatcctaaatttctaaaacgttttacttcttacgtccaagaaaaaactgcaggaaagcctattttgttctagtattaacagtgactgaagcaaggctgtgt

SEQ ID NO: 871 - DNA, 211 bp, Homo sapiens
acaccatgtctctgcacttgaagctcatggaatgtgttggaggagactcaagctccatgtgggaacagtgtggcccaagagccagcatggaggagggctgtgtgagcagactgctatagaatgctaaagttataatcctagctggtgtctcgttctgtttaaaaaaatcaaatttctgtatgtaattgacgtattggtccttatagtcagt

SEQ ID NO: 872 - DNA, 360 bp, Homo sapiens
acacattggaatttgaatgcagtggccaggacagcagcttataaaccaccttataggtaggtaagcaacccacgggattccctcggctgggctggggatggggagggggcagtggacaggaagcgggcagggcctgaggaccctgttctttaataggccacaacagggctcagctcctctcagaacttttgctacaatcagagttaagaccagatacatgctacctaaggccatgaacttgacaatatctgctccagagaagccctgaaccctcgccctaggtccccatgatttaaacccaatggtaagcccaagtctcacctttctaaatattctgtttatcagttaagcttattatgt

SEQ ID NO: 873 - DNA, 237 bp, Homo sapiens
  misc_feature 230: n = A,T,C or G
acttaattcctgtcattttgtgaattattttttggttttgtgtatcctctcatcctgttctcctcttatcattgtggtttgctggttttctgtagtagtaacacttgcctcctctatttatttatttatttttttgtgagaccgacactcactctgttgcccagcctggagtgcaggggtgcaatctcggctcactgcaacctctgccccctgggttcaagcaattctgncccaacc

SEQ ID NO: 874 - DNA, 433 bp, Homo sapiens
acggtggcggggaggacgactaggcggcctgcctgcagggctggggaccaaacgtcaggccacagagcatctccaaggggtctcagttcccccttcagctgaggacttcggagcttgtcaggaagtggccgtagcaacttggcggagacaggctatgagtctgacgttagagtggttgcttccttagcctttcaggatggaggaatgtgggcagtttgacttcagcactgaaaacctctccacctgggccagggttgcctcagaggccaagtttccagaagcctcttacctgccgtaaaatgctcaaccctgtgtcctgggcctgggcctgctgtgactgacctacagtggactttctctctggaatggaaccttcttaggcctcctggtgcaacttaatttttttttttaatgctatcttcaaaacgttaga

SEQ ID NO: 875 - DNA, 433 bp, Homo sapiens
acggatgctacttgtccaatgatggtaaaagggtagcttactggttgtcctccgattcaggttagaatgaggaggtctgcggctaggagtcaataaagtgattggcttagtgggcgaaatgttatgctttgttgtttggatatatggaggatggggattattgctaggatgaggatggatagtaatagggcaaggacgcctcctagtttgttagggacggatcggagaattgtgtaggcgaataggaaatatcattcgggcttgatgtggggaggggtgtttaaggggttggctagggtataattgtctgggtcgcctaggaggtctggtgagaatagtgttaatgtcattaataattagttatgaagtttttaaagacatgaaaaatatacatatatttttttgagtcagagtctcattcggtcgccaggtt

SEQ ID NO: 876 - DNA, 466 bp, Homo sapiens
acttttaaactagtaatagaattttctgaagaatatccaaataaaccaccaactgttaggtttttatccaaaatgtttcatccaaatgtgtatgctgatggtagcatatgtttagatatccttcagaatcgatggagtccaacatatgatgtatcttctatcttaacatcaattcagtctctgctggatgaaccgaatcctaacagtccagccaatagccaggcagcacagctttatcaggaaaacaaacgagaatatgagaaaagagtttcggccattgttgaacaaagctggaatgattcataatagacaactggtctgttaatctttttcatcattgttgtgtataatttacctctcattagaaaggctaacaaattttaagtgccacaggttttaaggattctgcagaaaaaaaagaaaaagtccttcagtttagaacctacaaaagcttgtgtatcttgat

SEQ ID NO: 877 - DNA, 365 bp, Homo sapiens
acactacaaacaaaagatatattagagacttttgaaaaatgctgaaatactttgcttcagaattggaatgtttatattatgtagaaatcttcaaaggtagcattattaaatagcaaagaataattagaacccacatatctttttttgtgtggatggggaaaatgttttaaaatccagttatttaatatgagtttgagagagaaaattgttttttaaaaatatatgtgcattgaaatgatggcaatgcttatagtatgatcaagtatgaaaggaactttaaattcttatatttacttttctctcagtaaattgttaaattttcactcagcaaaagattggcatttgttaagtgttctatatttagt

SEQ ID NO: 878 - DNA, 273 bp, Homo sapiens; identical to SEQ ID NO: 745

SEQ ID NO: 879 - DNA, 377 bp, Homo sapiens
  misc_feature 316: n = A,T,C or G
acccggcacacccagacccacaccaaggcccaggcaaatggacatccatgcctgcacttgcgtgccggtccctgtgtaagccctctctggacccactgcaggaaacaagcccaaacctgtggtgtccaaagagaaactagtcagaaaaccaggccaaaaagataccctgtgacctcccacacctgcacacacacccagagctagcatagaggctattcccagcagccccagagtcccagtggcggtgcctgcttctctctttccagatcgggatctgcggccgcaccggcagtgggaagtcctccttctctcttgncttcttccgcatggtggacacgttcgaaggtgagttgtaaggcgggcaccccacgtgtacc

SEQ ID NO: 880 - DNA, 351 bp, Homo sapiens
actcatttgggaagcctggagatttaaaaatttgctttggatctgtaaagacgccaccacactcctttgcgtgtgggttgtagcaataggcatcccatctttcactcctattgagacggattccataatcaataatgccagtttttccaaatccacagttgggccctggcttcacaatggggtatccaactctgcccttagccatccatccagcagcacagacatgaaatccaatttttctggctgcctctagctgcttgtaagttgcgagatggccgccttcaaattcacacaccgccttagcttctgcgtaggtgagcttgtatttgccagaccgtgcttctctgtggt

SEQ ID NO: 881 - DNA, 151 bp, Homo sapiens
  misc_feature 124, 146: n = A,T,C or G
actgtctttcaccctaaattttcaaacccgttccaaactggcctcgttgccctctacaccggtgtgcaggatcacctctctcctgtgtcccttaggcaaccatttgtctgtttctttttccttnctgtctatgcccaccttttggngaaac

SEQ ID NO: 882 - DNA, 164 bp, Homo sapiens
  misc_feature 30, 158: n = A,T,C or G
ttttttttttttttttttttttttttgganatttgcagttcactccatggaggcagggtgtttgctggggtcaagctgcttcaggcatggacaggttttcccctctaggggtgagacattttactgaaaattttttttggtaatggttgttggggggngttttt

SEQ ID NO: 883 - DNA, 278 bp, Homo sapiens
acaagttacttctggctttctctcgtcttgtggctgttcttcattttccatctttccttggtttgaagccattccttcattttcactgtagagtttttccatgtcgagatttcccctccttttcctgtcctgcggggattctggacaggttgctcctccttttcaggcttcgcagagcgctgggaacaacagacgcgcagacctggaagaagctggaccaagaattaggagcccaggaaccggagcagacgagacccagccgcggggacagagggcag

SEQ ID NO: 884 - DNA, 450 bp, Homo sapiens
acctggatgtccagctccaaaggcacagctgcatttaacgcctggacctgcccaagtctgtgacctctgggactctaggggctgacctgttcccttgttctagctctgggatagcccaatgcaaacttactactacaacccggttgtcctctccatggcctgcagctgttcacccaaggagtgcctgagcatcctttcttggaggaactacaaagagactcgctcaaggacttcctgtcagcagcagaaatgctgagtcatcagtattctgttacagttcattgaaagcagtgctgacagtggtgcggccagatggacaatagtgagagctccagggccccagctcagtgctgcacacaatgggtgacaccaaagaaaagcttttattaaaataatacagtctataatgaagaaattaaattttacaaacttcacccactctccagatga

SEQ ID NO: 885 - DNA, 481 bp, Homo sapiens
acagggtaggagctccaatggctaaccattcaccaactggaaggcttgtttgtaaacaggttctgaaataagagttggcagtgaaacaactgaggaggtgcctcagatcatgcaaaggggaaaagtgatttgcacctgctgacatgatggacattaaaaaaaaaaaaaaagccaatagttgaccttcagttcaagatttcaagatttacagacctaaaagtttagaactacatccaagccaatggttctcatactttagcttgcagaaagtcacctacaagaaacctgtgaaaatgcagatacctgggccctatacctagagattctaactcaggtgatccaaatggtccaagcaccttttgcttttgagaaaccttgctcatagcaaatagcagcacacagtctttgattaaaaggccaagatgtccaagaaataaaccaatgagttcattacctatagacgaccactcaggagactcta

SEQ ID NO: 886 - DNA, 359 bp, Homo sapiens
acatagaaaaggtatattttggggtgctaatgaacacttcaaattaagtaatgatattggtaaggatcaaactgcactattagtcttgttaataccacactggcacacacactgcatatatatgtatttttctaagataaaactcttctcagaatttcattactttttattatacaccaactagtttatattgtagttctttacaaagaaaatgctaagaaaaattataatcacatgttatatggttttaaaataataattccagatttctttacatataagatggaatggtccagcagctatatccactgtcacagactttaattccgttcaatgatatggcacatcctgcaaaatta

SEQ ID NO: 887 - DNA, 378 bp, Homo sapiens
catatatataaataggttattgaatgggtattctcttttccctttaatttaaaaagtgatatttatttattaaaaggagcattggtagaattattggtttatagtatcttctttaataatccttacaattacatatactaataggatgttaaaattatcatcgtgtttcctatttgtgtttagattcttataaagcatgagatgagtaatcaagggaagggtcgcatctccatgtttgccccatgaatagaatccatttgacaagccatttcatttcctttctggagaaagggagttgttttttttctttttgcagcaaaaatttaaggttttattgggggaggggtggtgctacttcctctgtacatgtttttaaac

SEQ ID NO: 888 - DNA, 429 bp, Homo sapiens
  misc_feature 412: n = A,T,C or G
gtgggtggggccaaagaggaggcttctattgataaatccagagcctcaaggggcccagccacgtcaaacttctctccctcagggactctccagcaccaaaaggcagaaggtggaagccgtttttcccccagagccctgtgtttttgtgaaaggcctcactgtggctcctctgttttacatactcattagtaagtgggaggtccactggggcaacagacactgccacaatttcagtgttgtgttcagccaaggggacggtctggacaggcagcttaagtgtgagtttagtcacaactcctgagtgtcccgctctcctgcttacctaggaggtgagtgccaggaaaatacaccaaatgcttctagtattgtttccccacttaaaatagtcctgcttaaattcacatggtgtggnctgatgttctgagagca

SEQ ID NO: 889 - DNA, 461 bp, Homo sapiens
  misc_feature 372: n = A,T,C or G
acaacttccatggcaaaagatgttggtctcaagattacaagtgtaaaaacagatatacgacggatttcaggtttagtaactgatgtaatatcattgacagattctgtgcaagaactagaaaataaaatagagaaagtagaaaaaaatacagtaaaaaatataggtgatcttctttcaagcagtattgatcgaacagcaacgctccgaaagacagcatctgaaaattcacaaagaattaactctgttaagaagacgctaaccgaactaaagagtgacttcgacaaacatacagatagatttctaagcttagaaagtgacagagccaaagttctgaagacagtgacttttgcaaatgatctaaaaccaaaggtntataatctaaagaaggacttttcccgtttagaaccattagtaaatgatttaacactacgcattgggagatgggttaccgacttactaca

SEQ ID NO: 890 - DNA, 292 bp, Homo sapiens
ctcgcgtggcagcaccgggtttttgtgggcggagatgacttcaagtcaggccagaccaaagtcaagtccgtgcttgtggacttcctcattggctccggcctcaagaccatgtccatcgtgagttacaaccacctgggcaacaacgatggggagaacctgtcggcgccattgcagttccgccctaaggaggtgtccaagagcaacgtggtggacgacatggtgcagagcaacccagtgctctatacgcccggcgaagagcctgaccactgcgtggtcatcaagtatgtgccgt

SEQ ID NO: 891 - DNA, 133 bp, Homo sapiens
ctgaatccctctctgatcatcggggtggtgcatctaacacaacagatgcccaggttgatagcattgtggatcccatgttagatctggatattcaagaattagccagtcttaccactggaggaggagaggtgga

SEQ ID NO: 892 - DNA, 311 bp, Homo sapiens
  misc_feature 130, 305: n = A,T,C or G
accttctgatcaaagccacagacccagctcccaaactgaagagtgactcacagaccaagactttgaagcttttgaaaatccagctgatgtgtatcgaagggggctattctctgggtggggaaaagcccanacgtctgctacaatcccccccaagtctcctgatgtcaagcaatccttcgtgacttccctatgccaaaaggagctttaaagtcctataccaacacgcaggcacacatgtgcacgcacacgcacatacacacacacacacacacacacacacaccctgaatctgctctccatgcctnagatta

SEQ ID NO: 893 - DNA, 283 bp, Homo sapiens; identical to SEQ ID NO: 739

SEQ ID NO: 894 - DNA, 441 bp, Homo sapiens
acactattacaaagtagtggttctctgtatgtctatgtgtatatatgtatatataaaactatacagatacatgtgtgtatataaacatacatatgtatatatacacacatatacttaattttaaagttaatcaaatggttatcaaaaattaatatacaacaaagattcctgggaaggtaatgcttatataaaataaggccatgtttctaaaaatccctcaaatcagtccaagataagatttttaatgaagaacataaaggttaaagaaattctttctctccaggttagctgtttttccctacttgttttcttcttgctttttcctgttgttgtccatattaaacttctttgtgctcttaaaggcccgccatcatgtgaagtggccacgccccttatggacaaagtcaagccaccaactcccaaatgtatcagtgcagctgc

SEQ ID NO: 895 - DNA, 440 bp, Homo sapiens
acttacttctcaatcctaaagagagaaaacaggtgtttgatcagtatgtaaagaccagggcaggggaagaacgcagggaaaagaaaaataaaataatgcaagccaaggaagatttcaaaaaaatgatggaagaagcaaaatttaatccaagagcaacttttagtgaatttgcagccaagcatgctaaagattcaagattcaaagcaattgaaaagatgaaagaccgagaagccttgtttaatgagtttgtggccgctgctaggaagaaagagaaagaagattcgaagaccagaggtgagaagattaaatcggatttctttgaactattatctaatcatcacttggacagtcagtctcgatggagcaaagtaaaagacaaagtagaaagtgatccacgttacaaagcagtagatagttcatcaatgagagaagaccttttc

SEQ ID NO: 896 - DNA, 295 bp, Homo sapiens
ggaacttccaaccagtatccagctcaagaaaccctggactcccatggaacaagcagtagagaaatggtgtcctctttaccacctatcaatactgtgttcatgggaacagcagctggaggcacttaaaccaccaatgtgggagggggtgctaaaactttaaaaaaaaatctctactgtgcaaatatcattatttactcttatggaagtctgagtgaataatgatatttgcacagacttccataagagtaaataaaaatgaatatgcagtggctgacattgttttaaagtcactggt

SEQ ID NO: 897 - DNA, 318 bp, Homo sapiens; identical to SEQ ID NO: 532

SEQ ID NO: 898 - DNA, 304 bp, Homo sapiens
  misc_feature 32, 52, 87, 167, 179: n = A,T,C or G
tacaagcttttttttttttttttttttttttngaagggaacataaactcaanattttattgtcttcataataaaagatgacacttanaactggatcacttggccctttctcttcttatctcctcccagttcaaaatgcttgcatcttttaatagccagcattctctnaaatctgcagtngggctcaacgcactcaagccttagcacaatcttctttgtagttttagcctttttccggaaaatcggcttagtttgcccaccatagccactctgcttcctgtcataacgccgctttccctgggcgt

SEQ ID NO: 899 - DNA, 336 bp, Homo sapiens
acaacatcacagaatccatactggagagaaaccttacaaatgtgatgaatgtggcaaagtcttcagtcaaaattcataccttgcatatcattggagaattcatactggagaaaaagcttataaatgtaatgaatgtgggaaggtcttcggtctaaactcatccctagcacatcatcggaaaattcacactggagagaaacctttcaaatgtaatgaatgtggcaaagcttttagtatgcgttcaagcctcactaatcatcatgcgatccacactggagagaaacatttcaaatgtaatgaatgtggcaaactcttccgcgacaattcatatcttgt

SEQ ID NO: 900 - DNA, 115 bp, Homo sapiens; identical to SEQ ID NO: 586

SEQ ID NO: 901 - DNA, 157 bp, Homo sapiens
  misc_feature 35, 47, 71, 89, 141, 148: n = A,T,C or G
acaagctttttttttttttttttttttttttttcnaaagctcagganctttaatggggctgaaagggtcanaaacacaccgggagtttntcctgggagtgtggggacaggaggaagggggccgtgtgtcacggaggacggnggctttnaccaaacct

SEQ ID NO: 902 - DNA, 392 bp, Homo sapiens
actccagcctgggcaacaagagtgaaactctgtctcaaaaaaataaataaataaataaattgctttatggaagaaagtaagtatagatggagagaaagggatctgataaccgaagcagggaataaatgtttggagtccacagcatcctgagaacttcttgggaatagagtctaggcctccagtgctgtcactctcacccatcttcctctacacatgtgagatgtttcaggacccagtggcctttgaggatgtggctgtgaacttcacccaggaagagtggacattgctggatatttcccagaagaatctcttcagggaagtgatgctggaaactttcaggaacctgacctctataggaaaaaaatggagtgaccagaacattgaatatgagt

SEQ ID NO: 903 - DNA, 400 bp, Homo sapiens
acaccaagcacctatttttataacttagcttcccatggagagataatggcttgcgtgcattttatgtatccataacatacatacaaggctcggtcttttcaatgggataacagttcacaactcttcgatttgaattgtaatgaatctggtgacaaggatttttctctaatggattccaaagttagccagaacttttaatgtcaagatgaaaaagggtgtaaggtgttatattttcttcaattcctttaccacaggaggctaactccacaatttccctcatgtttctcattcagaaaaaaaaatattaaatttgtgttcagaattatttgatggttgcttctttgtgctgatgtttcagttcctgaagtcaacttggctctcacaattttctaggtcaggt

SEQ ID NO: 904 - DNA, 256 bp, Homo sapiens
  misc_feature 168: n = A,T,C or G
ctcgcccggagaacggggaggaatatgctgtggagctcctctgccatataaacaaaaagaggaaatctttcaaacatggctgaagcaaagacccactggcttggagcagccctgtctcttatccctttaattttcctcatctctggggctgaagcagcttcatttcanagaaaccagctgcttcagaaagaaccagacctcaggttggaaaatgtccaaaagtttcccagtcctgaaatgatcagggctttggagt

SEQ ID NO: 905 - DNA, 354 bp, Homo sapiens
acaaggtcaatacataagccagagtgaatgatactacaagttgagcatctctaattcaaaaatctgaaatccagaagcttcaaaatctgaatctttttgagcactgacttgaccccacaagtggaaaattccccacccgacacctttgctttctgatggcttcagtttaaacagattttgtttcttgcacaaaatttttgtataaattactttcaggctatatgtataaggtggatgtgaaacatgaattatgtaattagagtcgggtcccgttgtgtatatgcagatattccaaacctgaaatccaaaacacttctggtccctagcattttggataagggatactcagcttgt

SEQ ID NO: 906 - DNA, 528 bp, Homo sapiens
actccaggtcactgtgcagggggccaacactgtaggcacctttgtcatcagtaaagactgtgatcagcggtgaacttgcccccttttcactgatgacaatctcgactccttccaactcggggtggatctggccttctaaaaacaggcctgccttcccatggatctcgatcagcttccctgggcagctttctccactgacaacggcttccattgaagggggataaaagagcagctctttagatgacggtgtaacagtgattttctctccagaccgcgcccagtaagagaaatcatatgagaaggggccttgtaactcatctaccatctcctgcacgggaggcttggtcattctttcttcgccttcctcattgccgtttttctccctctcctgcctgcgggcctcgatctcagccagctgctgctccctccgcagctcctgcacagacttcagagggcctaagaccaaggcgggttcactgtcgatggaagacttgatagtcacagtgacatccatcattttgtcggtgg

SEQ ID NO: 907 - DNA, 434 bp, Homo sapiens
acagaggtgttttttttctttaggcttctcatgcatatgaatattttaagcacgaatggactactaaatatctgagttttttttttttttttttttaaagatcctaacagaacatagcgtaacaatattggtcttccaggtgttactcatttcaattatgtgtagtataccaggacagacctattttcatgtcttatttctttaaagagctgcttcattggccgggcgccatggctcacgtctgtaatcccagcactttgggaggccgaggcgggtgggttacttgaggtcaggagttcgagaccagtctggcaaacatggcgaaaccccatcttaactaaaaatacaaaaaaattagccgggtgtggtgtcacgcgcctgtaatcccagctacttggggggctcaggcaggagaattgcctgaacccaggagg

SEQ ID NO: 908 - DNA, 174 bp, Homo sapiens
gtggtggtgtatgcctgttatcctagctgcttgggaggctgaggcaggagaatcgcttgaacctgggagatggagattgcagtgagtcaagatcttgccactgcactccagtttgggcaacagagtgagactccatctcgaaaaaaaaaaaaaaaaaaaaaaaaaaaagcttgt

SEQ ID NO: 909 - DNA, 478 bp, Homo sapiens
acaatccataagacaactgaatgcaacaactgctgggttcactgacaaagattataaaaatcatcacgttcaaagtagagtttttagccaaggtcaagaactaacctggggctgagtcagcgtctctacccacttaaataacagcgtaaagatctttcactaaattcgttatgtggtctgtctggatgtaaacctatatatttccttttgaaacagaatcatatcctgcagactcttggcactcctgcatagctttgaccgaatgttcactctcatcgtaatggaagatttctatctatgcagataatacatgtttttaaatgctgttttctgtttagtcctcaatcttcctaactcaaattggggactgaggagagagaaaggtggttacccctgttaccgtgccatattcttcttgctgcttttcaaccccacgtgattgttgattgacggttctgctataatgtgcgtgcccttc

SEQ ID NO: 910 - DNA, 322 bp, Homo sapiens
  misc_feature 120: n = A,T,C or G
gccttttcttcccatcaaaaatgcattaacaagatcatgcttatagttagtcagcacaagaaaaaaacgacaatttatactgaactatttaagtcttgcagtagagtgctcacaactccnagctgtatctgttaaccttttcaatagcattcattatggtgacattgtcaccaattacagtaaaagaacttcactaatttttgaaagctagaattactcaaaaaattctgcattgtaaataataccaggaatattgcatttaagcctaggatggcaaaattacttaaatcttttctatacttttttgtgtaatataggtagg

SEQ ID NO: 911 - DNA, 388 bp, Homo sapiens
  misc_feature 343, 358, 378, 384, 386: n = A,T,C or G
acgtagctgtggggtcaggctaactgcccatcaagtgcttttcctttgatgacaccatgttctgccttgtaacactaggacctgcaccccttgaggcaacacttccatgagtttcctttcatgcctcttagatattttttgcatctgacaggactgctgataaaagcattagggggattaatgactttatacactaatctctctgcaggcatcaaattctttcttcaggacagacacccagaattactggctcaaaaacaggaccttttaaaaaatactcttaccacaaattgccaaactgctttctgcaaaggccataccattttccatccccaccagcagncatgagagtgcctgncctatcccataccttgcccncatggnanac

SEQ ID NO: 912 - DNA, 474 bp, Homo sapiens
acaggagtgtgatgttggagaactatagcaacctggtgtccctaggtaagtgctgcctccctgaggaggagtgtgctcgatctccaggcttcttcttggttgctgaaaactggaggccttctatgaaatacttagtgattttggacttagattttaaggccagattttcttagttccctattggcagcagagtatgccagttgaatggtctttactttgccaaattgcaaaaaggcagcttcatcatgctacctccaaaccaaatctttcccgttcttcagaatctctgaatctcaagctgtttgttccaggttgtctgtgatttttctatttatagggtacctctctagagaaaaaacagaaaataaggaacaaagggaaggcagttttactagtgagaagatgcaaatcaaaagcaaactggaaagcaagagcaatagtaagggtgagatgagggactggagttgagactgc

SEQ ID NO: 913 - DNA, 432 bp, Homo sapiens
actacgttgtagctcacttccactatgtcctatcaataggagctgtatttgccatcataggaggcttcattcactgatttcccctattctcaggctacaccctagaccaaacctacgccttaatccatttcactatcatattcatcggcgtaaatctaactttcttcccacaacactttctcggcctatccggaatgccccgacgttactcggactaccccgatgcatacaccacatgaaacatcctatcatctgtaggctcattcatttctctaacagcagtaatattaataattttcatgatttgagaagccttcgcttcagaagcgaaaagtcctaatagtagaagaaccctccataaacctggagtgactatatggatgccccccaccctaccacacattcgaagacccgtatacatatagtcactcc

SEQ ID NO: 914 - DNA, 468 bp, Homo sapiens
gttgatgcccttatctactgataatatcctctcaatgttcactgcggcatagaaattatttcagagtagaaattgcagcatgaggataaactcacctctttgttctgaaaatagaactttatcactatgctttccggtggttttcccttttacaatcgaaatcttgtgcctcccaagtgcattggaaaatgacaaaagcctgtctctccaaattcctatttaacagtttgattttttttttaatcaccatctttcaaatcttagctcaactctcaccaagtgaaaattggctacttgggagaaagttaactttctatggtgggatggtgaaggatgagggacagtttacataggaaaagaaaaaaaaaagtctaaagtccatgttgaaaaaccacactaccacttattttctgctaaccctaaattatttttgcgtatacgcttgaggttatagtctgtgcctagacc

SEQ ID NO: 915 - DNA, 423 bp, Homo sapiens
  misc_feature 13: n = A,T,C or G
acgaaaggcaatntaaagagattaaactagcagatgtgtcagcatctttagatactgtgcttaatggaaacttagtttacctatattcgtgagaataggaatacagggatagagagcctgcttctctcaggcagtgtgtctttagttcatttttagtttcaaaattaagtttgtgtcaaaccaacctacaatctagtaacttgtgtattggactcacttttactcagacaaggtcagttcagctcaataggtatttattgagtatctactaggttctaagtgacgtggcatgaagatgaataatacagaagtagcccttgctcttaaggagcttccaatctagtgagtaaagaaaatttacattttaaataatctgggtaatggtgacagcccaatactaatatgtaaagccagtaggaatgt

SEQ ID NO: 916 - DNA, 473 bp, Homo sapiens
  misc_feature 155, 181, 208, 268, 415, 439, 447: n = A,T,C or G
acaagctttttttttttttttttttttttttttaccttttaaactcttttattaaaaattaagacacaaacacacacattagttaggcctacacagggtcaggatcatcaatatctttcacctccacattttctcccactggaaggtcatcaaanacaataacacgcatggagctgtcatntcctatgcaaatggtagcttcttccanaatacctcctgaaggacctgcctgtgtctgttttacagttaactttttaaaaaaattaanagtacactctaaaataatgataaaagtttaatacagtaaatacataaaccagtaacagtcgtttattatcaagtatcatgtactgtacataattgtatatggtagacttttaaagaactggcagtagagtatgtttgtttacatcanactcaccacaaataattgagtaantgtgttgngctacgatggtctggaagctatgttc

SEQ ID NO: 917 - DNA, 571 bp, Homo sapiens
accaaggaagaagcagctaagatggaaaaggaatatggaagcttgaaggattccacaaaagatgataactccaacccaggaggaaagacagatgaacccaaaggaaaaacagaagcctatttggaagccatcagaaaaaatattgaatggttgaagaaacatgacaaaaagggaaataaagaagattatgacctttcaaagatgagagacttcatcaataaacaagctgatgcttatgtggagaaaggcatccttgacaaggaagaagccgaggccatcaagcgcatttatagcagcctgtaaaaatggcaaaagatccaggagtctttcaactgtttcagaaaacataatatagcttaaaacacttctaattctgtgattaaaattttttgacccaagggttattagaaagtgctgaatttacagtagttaaccttttacaagtggttaaaacatagctttcttcccgtaaaaactatctgaaagtaaagttgtatgtaagctgagattttgtatacagaatccttatttcctcatagacttatattttataatcagaatatgttgcttt

SEQ ID NO: 918 - DNA, 551 bp, Homo sapiens
accaaggaagaagcagctaagatggaaaaggaatatggaagcttgaaggattccacaaaagatgataactccaacccaggaggaaagacagatgaacccaaaggaaaaacagaagcctatttggaagccatcagaaaaaatattgaatggttgaagaaacatgacaaaaagggaaataaagaagattatgacctttcaaagatgagagacttcatcaataaacaagctgatgcttatgtggagaaaggcatccttgacaaggaagaagccgaggccatcaagcgcatttatagcagcctgtaaaaatggcaaaagatccaggagtctttcaactgtttcagaaaacataatatagcttaaaacacttctaattctgtgattaaaattttttgacccaagggttattagaaagtgctgaatttacagtagttaaccttttacaagtggttaaaacatagctttcttcccgtaaaaactatctgaaagtaaagttgtatgtaagctgagattttgtatacagaatccttatttcctcatagacttatatttta

SEQ ID NO: 919 - DNA, 190 bp, Homo sapiens
  misc_feature 167: n = A,T,C or G
attctatactccagcctgggtgacagagtgaaaccctgtctcaaaaaaaaaagaggaaagaaaatagctaggagacaatcagagcagaccttgggcttctgtggctcatctcagccctttataactggcctgagaagagggtttatctacttgtgcaagtggcccanaaatctcactcgtacctcggccg

SEQ ID NO: 920 - DNA, 483 bp, Homo sapiens
  misc_feature 470: n = A,T,C or G
actattttgtccacaagtgacatctttatatacatattctgccgaaacttaggattctaggcatgtggccatctcaatttgtcccgagatataaatgttttcaaaaagctaatttcaatcaaatatgcttctgacccaacactaggagttttatttttacttggcatttaaatgggttattagacaaaactaatcgccttggtattttgtttttctgaataatattatgggggggggggggctaagacgtttaaattaatattgttttcacatcaaggaaccatcgtcagaacaaagttcccttgtaatggtcggccctgtcagtgaaattttcattaggatgataatgtgcaaggagcagggagagaaaggacaaggcaatgaacacatgcatcccagtggagggagaacgaggctgatgtgcaacacagctgaggaaaatttatagattaaactattcaaaactgctnagcagcctcctgt

SEQ ID NO: 921 - DNA, 547 bp, Homo sapiens
ctctgctagacctgcaaaacaacaaaataaccgaaatcaaagatggagactttaagaacctgaagaaccttcacgcattgattcttgtcaacaataaaattagcaaagttagtcctggagcatttacacctttggtgaagttggaacgactttatctgtccaagaatcagctgaaggaattgccagaaaaaatgcccaaaactcttcaggagctgcatgcccatgagaatgagatcaccaaagtgcgaaaagttactttcaatggactgaaccagatgattgtcatagaactgggcaccaatccgctgaagagctcaggaattgaaaatggggctttccagggaatgaagaagctctcctacatccgcattgctgataccaatatcaccagcattcctcaaggtcttcctccttcccttacggaattacatcttgatggcaacaaaatcagcagagttgatgcagctagcctgaaaggactgaataatttggctaagttgggattgagtttcaacagcatctctgctgttgacaatggctctctggc

SEQ ID NO: 922 - DNA, 422 bp, Homo sapiens
  misc_feature 267: n = A,T,C or G
acaatcgagtattttagaaattacatgaaacatgaaacagtttttgcaattttttttaaactgggcatctggtttctaaaaatttatttgaaacaatctagaattttcttggtgcaaagtgtatcatgtggaatatcctcatatttttaccatattttaagaactttaagacgattaattgtaaataatttatttgattggtgcagttctaatccctaaatcataatcttaaaatcaggaatgtgtggagaacagagccatgtcatntcactttgctcttaccattccttttgatcagcctcaattcagcctcattgtgtagtatgttttttctttctatgaaaaacaacagaaagcatttcattttatttgcctatgttcaaatatgtttaataatgaccaaagtgcattctgagtttttt

SEQ ID NO: 923 - DNA, 510 bp, Homo sapiens
acatataaaatagttgtatattatgacattttaaatcataaaataatgtattttattgcaaaataatacattgacattgaaaacaaaacatagtggaagtcccccaataccacacctcctaatttccctcccctcctcaaaggtagccatctttaacagcttgatgtattacctttttatgtcctttaacaagcaaaataaattttgtagtctttaaagcaatgtaatacacttgctggattttaaatttttgtctctttcaaaaccagaaaggggaaaataaaaacccacagcaataaacatcatttaagatttttttccccgccacgaggttttgaagattaaaaactgctttggtttttgtttgttttgttttattaatgaagtaattcaaggtaggcagttgccaatgtgagagaacttacatatgctatactgctataatcgagtttttgtgaattcattcattctcctgcaattaaggttctccatagcatgtaaactatagag

SEQ ID NO: 924 - DNA, 650 bp, Homo sapiens
gccttgctacattggaatctgtcttccaagagctggggaaactgacaggaccaaacaaccagaaacgtgagaggatggatgaggagcaaaaactttatacggatgatgaagatgatatctacaaggctaataacattgcctatgaagatgtggtcgggggagaagactggaacccagtagaggagaaaatagagagtcaaacccaggaagaggtgagagacagcaaagagaatatagaaaaaaatgaacaaatcaacgatgagatgaaacgctcagggcagcttggcatccaggaagaagatcttcggaaagagagtaaagaccaactctcagatgatgtctccaaagtaattgcctatttgaaaaggttagtaaatgctgcaggaagtgggaggttacagaatgggcaaaatggggaaagggccaccaggctttttgagaaacctcttgattctcagtctatttatcagctgattgaaatctcaaggaatttacagatacccccagaagacttaattgagatgctcaaaactggggagaagccgaatggatcagtggaaccggagcgggagcttgaccttcctgttgacctagatgacatctcagaggctgacttagaccatccagacctgttccaaaataggatgctc

SEQ ID NO: 925 - DNA, 438 bp, Homo sapiens
  misc_feature 425, 429: n = A,T,C or G
acccagaccctccaaatccctgtcctgttggaaaaacagatgatggatgtctagaaaacacccctgacactgcagagttcagtcgagagttccagttgcaccagcatctctttgatccggaacatgactatccaggcttgggcaagtggaacaagaaactcctttacgagaagatgaagggaggagagagacgaaagcggaggagtgtcaatccatatctacaaggacagagactggataatgttgttgcaaagaagtctgtcccccatttttcagatgaggataaggatccagagtaaagagaagatgctagacgaaaacccacattacctgttaggcctcagcatggcttatgtgcacgtgtaaatggagtccctgtgaatgacagcatgtttcttacatagataattatggatacaaagcanctgnatgtagata

SEQ ID NO: 926 - DNA, 598 bp, Homo sapiens
accttttcttcccatcaaaaatgcattaacaagatcatgcttatagttagtcagcacaagaaaaaaacgacaatttatactgaactatttaagtcttgcagtagagtgctcacaactccgagctgtatctgttaaccttttcaatagcattcattatgtgacattgtcaccaattacagtaaaagaacttcactaatttttgaaagctagaattactcaaaaaattctgcattgtaaataataccaggaatattgcatttaagcctaggatggcaaaattacttaaatcttttctatacttttttgtgtaatataggtaggaaaatgaatactatataagagaatgaaatatatcaagttcttatatttttacctaagaggctatttattttaaggaaagttgattaatatttaaatgattaaaaaataaatcaatgttaagtattaactgcacaaaatctaaaaaaaagaccacattacatcatactacattatatagatagatttaaagcagctaactagaagcctttttaaaaatttaaagtttctgacatcattttccaccattccatcaattcttccttctcctcttctttcc

SEQ ID NO: 927 - DNA, 281 bp, Homo sapiens
accattggtggccaattgatttgatggtaagggagggatcgttgacctcgtctgttatgtaaaggatgcgtagggatgggagggcgatgaggactaggatgatggcgggcaggatagttcagacggtttctatttcctgagcgtctgagatgttagtattagttagttttgttgtgagtgttaggaaaagggcatacaggactaggaagcagataaggaaaatgattatgagggcgtgatcatgaaaggtgataagctcttctatgataggggaagtagcg

SEQ ID NO: 928 - DNA, 476 bp, Homo sapiens
acaaggctgccaactccatccgcctagtgaggatacagtgatattcaggccaaattgaatttcttcccccggggaagattattttgcccctttgctctctgttttgttttataagtaaaaggtgtggttgtgaaatccatcttttgtgtcctgctgctgatcaatctcaacatgaccccagggagctcgggcacaggggcctttccctgaccagctcccctgttgtttcttaactggctgcctggccacctcttgctccagttgtaatgacttttgtcatgtaagcatgtctgaaaggagtcacagtcaactctcaaggtagcccttcaaacaagcgagtgattataagtattgatattcacttcccacactacgacaagaatcagcaaaaacagtagtttggtgtcagatacatttagtgactcactaagatgacattatcatttttttatacataaaaatacttgtatcttatt

SEQ ID NO: 929 - DNA, 371 bp, Homo sapiens
acctccaaagcctgcaaaactgctttcttttttgatataggaggcttagcagcttgttttagaattaaatcttcaaaaaattttgtccgttcttctttatccggtaactggacattaaaaatctctccataatcacggataaacaattcttgcacctcttctggcaaagcggaatggggtttgtcagaagttgcaagtagtaaaactggagcaaatgaaggaatattctgtaataatgtggtaaatgtggctttaagtgtcggtccaactatttcccaccacacgtggatatgaggaacatacactatacttggtgctgttctcttagcttcacgaatcacctgggcacatgtttcttcaggggatgtagt

SEQ ID NO: 930 - DNA, 462 bp, Homo sapiens
acctggagggatgcaagacttcaattaccttagcagcaactgttttgagatcaccgtggagcttagctgtgagaagttcccacctgaagagactctgaagacctactgggaggataacaaaaactccctcattagctaccttgagcagatacaccgaggagttaaaggatttgtccgagaccttcaaggtaacccaattgcgaatgccaccatctccgtggaaggaatagaccacgatgttacatccgcaaaggatggtgattactggagattgcttatacctggaaactataaacttacagcctcagctccaggctatctggcaataacaaagaaagtggcagttccttacagccctgctgctggggttgattttgaactggagtcattttctgaaaggaaagaagaggagaaggaagaattgatggaatggtggaaaatgatgtcagaaactttaaattt

SEQ ID NO: 931 - DNA, 449 bp, Homo sapiens
acatgactgatattacacctcaaggtgtggctatgagagctggagttctggctgatgatcacttgattgaagtgaatggagagaatgtagaagatgccagccatgaggaagtggttgaaaaggtgaagaagtcaggaagccgtgtcatgttcctgctggtggacaaagaaactgacaagcgtcatgttgagcagaagatacaattcaaaagagaaacagccagtttgaaactgttaccccaccagccccgaattgtggagatgaagaaaggaagcaatggctatggtttctatctgagggcaggctcagaacagaaaggtcaaatcatcaaggacatagattctggaagtccagcagaggaggctggcttgaagaacaatgatctggtagttgctgtcaacggcgagtctgtggaaaccctggatcatgacagtgtggtagaatgatta

SEQ ID NO: 932 - DNA, 342 bp, Homo sapiens
accttattgactcgggtgctcaatacaaggatggcaccgcagatgtgacgcggacaatgcattttgggacccctacagcctacgagaaggaatgcttcacatatgtcctcaagggccacatagctgtgagtgcagccgttttcccgactggaaccaaaggtcaccttcttgactcctttgcccgttcagctttatgggattcaggcctagattacttgcacgggactggacatggtgttgggtcttttttgaatgtccatgagggtccttgcggcatcagttacaaaacattctctgatgagcccttggaggcaggcatgattgtcactgatgagcccgggt

SEQ ID NO: 933 - DNA, 369 bp, Homo sapiens
ccgaaacctagccccggacgagaagcgcagcaacgtgcggtgggaccacgagagcgtttgtaaatattatctctgtggtttttgtcctgcggaattgttcacaaatacacgttctgatcttggtccgtgtgaaaaaattcatgatgaaaatctacgaaaacagtatgagaagagctctcgtttcatgaaagttggctatgagagagattttttgcgatacttacagagcttacttgcagaagtagaacgtaggatcagacgaggccatgctcgtttggcattatctcaaaaccagcagtcttctggggccgctggcccaacaggcaaaaatgaagaaaaaattcaggttctaacagacaaaattgatgt

SEQ ID NO: 934 - DNA, 399 bp, Homo sapiens; identical to SEQ ID NO: 566

SEQ ID NO: 935 - DNA, 462 bp, Homo sapiens
accggtctttctcaaatatcatcagcaccctcaatcccactgctaaacgacatttggtcctcgcctgccactatgactccaagtatttttcccactggaacaacagagtgtttgtaggagccactgattcagccgtgccatgtgcaatgatgttggaacttgctcgtgccttagacaagaaactcctttccttaaagactgtttcagactccaagccagatttgtcacttcagctgatcttctttgatggtgaagaggcttttcttcactggtctcctcaagattctctctatgggtctcgacacttagctgcaaagatggcatcgaccccgcacccacctggagcgagaggcaccagccaactgcatggcatggatttattggtcttattggatttgattggagctccaaacccaacgtttcccaatttttttccaaactcagccaggtggttcgaaagac

SEQ ID NO: 936 - DNA, 418 bp, Homo sapiens
  misc_feature 250: n = A,T,C or G
actcagtatttcaaatcagaacacaagattggaacttttggaaaaatgggttcaagctttcctattagccatggaaatgcaaagtttagcagaagcaagcaattaggcagagaacaaaaatgttaagcatggtgttgtctatcttattgaagtggttggaaatgaaagcttttaatttgatagatttatcagtataaaattagggaaaccacgtgtggggaatgaatcaatttagagcttcgggaattgngaggtgacttttgtaacttttgttctgtgtgtgacctgtgaaccactaggatgtgatctgcccttgtgggcaggtccagcatagttaggagttaggctttagcataaatttctagctgcatctgagtctcctgggatgggtgctctttggctggttttggctgcggat

SEQ ID NO: 937 - DNA, 318 bp, Homo sapiens
acccgcttttaggcatacagattgtaaaactgaagttcacttttctttgatcggttttgcgtagcaacagagaagtataaatcaaacaggaatcaaaatggctaaatatgcaagaaatcgttattcacagtgacatggctacatagaatgcattattctatgcatattctttccgttggttgaatttcaagataaaaagcacttgttttctacaggttcacaaaacagcgtaataacaagaacgatcaaggagaatgtaatgtaggcgttagttgagattaacaaactatggcccaatgcttatgtccactgcagagt

SEQ ID NO: 938 - DNA, 254 bp, Homo sapiens
actccaaagccctgatcatttcaggactgggaagcttttggacattttccaacctgaggtctggttctttctgaagcagctggtttctctgaaatgaagctgcttcagccccagagatgaggaaaattaaagggataagagacagggctgctccaagccagtgggtctttgcttcagccatgtttgaaagatttcctctttttgtttatatggcagaggagctccacagcatattcctccccgttctccgggcg

SEQ ID NO: 939 - DNA, 327 bp, Homo sapiens
  misc_feature 15, 40, 77, 80, 92, 112, 124, 142, 173, 194, 288: n = A,T,C or G
cattgccactcccancccattctgtaacccctgccactgnggctgttcatttcaaagtgggctgaggttccacaaancanctgaaaagctgngaatgggggttaattgcagngatgttaattancatgttataggaggtaanaaaaggggattcacatttctttttttactgnttcaaacaaatgatctaaatntttgctacataagccactggccacatgtggctatttaaatggaaattaataacaattaaagaaaaattaaagatcagttcctcgatcacactanctacattttagcgcttgatagccacatgtggctagtggc

SEQ ID NO: 940 - DNA, 368 bp, Homo sapiens
actaaattcagttataacatgttacagacttaaatcatagagctgccccaacatctagacagtctctcctactgattataaatgagtgaaaactatcagttagaaaaatctaatttaagttgttaatacatgtttctttggtgagcacctggatatatttatcacaaattcttttatacaaatgtcgaaaatgctttcaacaaacctaagtgtcctaattacatgccacttttaagcatcactttaaggtaaacaaaaatgaaaaccataattttaaattaaaatttgaaatgagacacaaaatcaacctggtaatatgagaactttttcttttgccatctctgattaatatgggacaattccaaagt

SEQ ID NO: 941 - DNA, 426 bp, Homo sapiens
actttttttagcaagagatgctttattctgcagcatgaacagatttaaaatggctggtgttaaatatcagctcctaataagatgtggactgaaaacactatcacaacactatgagaagcccctagcactggttaacgctttcctagtctagtctctggatttggggagcttgtcttcagtggctgagactgtgagctgggagcagttctctcagctggagagactcgggatggggtaacctggggaccagtctagcccctgcaccctcttccctgcctctgctccttgggagcgggtggagagacacccatgtggctccccttagggccagcaccaagcaccacgctctcatcctgcaagtcggcgcacacagtggatgaaggcaggagacccagaaagcagtgcagtgcagctctaataaaggcc

SEQ ID NO: 942 - DNA, 111 bp, Homo sapiens
  misc_feature 63: n = A,T,C or G
acagctcttaacattttattaagccatttgtgtagcccaccacgtttctttgtggtgcttgtnctgtgtggaagattgtaaatcttgggcctgttgcatacttacaagggc

SEQ ID NO: 943 - DNA, 202 bp, Homo sapiens
cgtggtgtatgaggaagacatgtttagtgaccagaatttcctggctcaggctactttcccagtaaaaggcctgaagacaggatacagagcagtgcctttgaagaacaactacagtgaggacctggagttggcctccctgctgatcaagattgacattttccctgccaagcaggagaatggtgacctcagtcccttcagtggt

SEQ ID NO: 944 - DNA, 581 bp, Homo sapiens
acacattttcatttgatctcttgcttttaaacttacactgaaagactgtagaatgtctattaataatatttaagggaactatgtgtctattccatagggaaaaaagacaccaatacccacaaatatcttatatatcagctgtttgtttacttcctagtcagtaggacaaagctttgttcctaaattaaaattggaggattattttgaactactggcccagtgatcttttaagaaatgaaaatatatttgtgtatgaggaggcaaggttgaaggaaatgagatatatgctgctttgcaactaaagacaaaaacatttgtttttaaacataattactatttaaatttagaagtaaagaaatcacaaaagaactccatcatagcatacacacaggttaaataatggcccctgaaataaaaccacatttagaaaccaactgttacactatatttcattatttctaaggtaacacattttaaattctgaaatcaagatatggttcaacattgaccttagtttcaataaaatatggcagtcatacaatatagttgtaattcatgtttcctcttaacattaatgatag

SEQ ID NO: 945 - DNA, 446 bp, Homo sapiens
  misc_feature 367, 440: n = A,T,C or G
aataatgacctttaatcttgtcatttggaaccataaagcatttttatcaggtacctctgttccaagggatttatgtcttagaccatagctgaattgaatgtttgcaaaacactgctataggataaggtggtctttagttttgaacgtgtgaaaggactgcacacctttcagccagggtttgagttactgcccagggtcatcgtctcaaagtaattcaaggagtgatttaacatcagcatttgaaatgtagtcttcatctcctgggatccataaaaaaatgtgaacagggaaatggtggctaagcagagcctgaaataataacttggcaaagaaatgagtttatcaggtcgagtcaaaacatggcatnccctgttacactcaagaaatgctttcttcatgtaaatgtttatacgggcatatataatcacaatgggaacagntaaaac

SEQ ID NO: 946 - DNA, 256 bp, Homo sapiens
acttgtggtattcagtatagacaagaggatatgcctttcacctgtgaaggtatcacccctgatatcatcatcaatccccatgccatcccctctcgtatgactattggtcacttaattgaatgccttcaagggaaggtatcggctaacaagggtgaaattggtgatgccactccatttaatgatgctgttaacgtgcagaagatttctaatcttttatctgattatggctatcatctcagaggaaatgaggtcctgt

SEQ ID NO: 947 - DNA, 504 bp, Homo sapiens
  misc_feature 475, 481: n = A,T,C or G
aaaaaattctgcattgtaaataataccaggaatattgcatttaagcctaggacggcaaaattacttaaatcttttctatacttttttgtgtaatataggtaggaaaatgaatactatataagagaatgaaatatatcaagttcttatatttttacctaagaggctatttattttaaggaaagttgattaatatttaaatgattaaaaaataaatcaatgttaagtattaactgcacaaaatctaaaaaaaagaccacattacatcatactacattatatagatagatttaaagcagctaactagaagcctttttaaaaatttaaagtttctgacatcattttccaccattccatcaattcttccttctcctcttctttcctttcagaaaatgactccagttcaaaatcaaccccagcagcagggctgtaaggaactgccactttctttgttattgccagatagcctggagctgangctgtnagtttatagtttccaggtataag

SEQ ID NO: 948 - DNA, 489 bp, Homo sapiens
acaaacagaagcaaaaagggcctattaaaaaaaaaaacagcaagatacatttaatcatttaataagcacttactgtgtgccgggccttgtgcaaagcactaaacatgaattatctcctggaaccatccaaacaatcctggcacaaaagtcctatgactaccattccacagatgggacactgaggatgggagcaaatgtgtgggggagctcagggctgtcatgtcacagcccacagtcaggcagtctctgggccagatggagaatattgaagaacaattataatacataagagctgctacttagtgagagatggcgctggactagaaatacaatctcagcaaatccttacaaccctttgagagtgatcttgttattatcccattttgtaaatgaggaacctgaggtagtaggaagggaagtcaactggaccagttctgaatctggccctcgggggtgaccaatactacggccagagccccaccctcagag

SEQ ID NO: 949 - DNA, 365 bp, Homo sapiens
  misc_feature 168: n = A,T,C or G
actttgcaattgagaccagaaagacttgtaggtctttctgcagaatgagtgggtccttgcaaagtgagtgggaaacttactcctagatcagaaatgtttgcctctctgagtaaaatgtttctttcagatgagccatagagggggcaccttttactcaacttttctttnttttgaaactttgtttcccatactgttttcagccttttgtttataattagaaattgtgagaagcttcatttagtgtttaaaaatgtggggagataaatcagacttaacatgtatgtaagatcaattcacttaaaagtatggtccaaatagcaaaaataggaccaggtgaaacatgtagtcattttttaaaaacatgt

SEQ ID NO: 950 - DNA, 489 bp, Homo sapiens
accacaactcccaggattttcctggatcaaaccttgtatctcttctgcaagtattgtgtatattggtctgagagacgtggaccctcctgaacattttattttaaagaactatgatatccagtatttttccatgagagatattgatcgacttggtatccagaaggtcatggaacgaacatttgatctgctgattggcaagagacaaagaccaatccatttgagttttgatattgatgcatttgaccctacactggctccagccacaggaactcctgttgtcgggggactaacctatcgagaaggcatgtatattgctgaggaaatacacaatacagggttgctatcagcactggatcttgttgaagtcaatcctcagttggccacctcagaggaagaggcgaagactacagctaacctggcagtagatgtgattgcttcaagctttggtcagacaagagaaggagggcatattgtctatgaccaacttcc

SEQ ID NO: 951 - DNA, 316 bp, Homo sapiens
  misc_feature 303: n = A,T,C or G
acctttgctgtcttgctcaagcttggtatggcatgaaaactcgactttattccaaaagtaacttcaaaatttaaaatactagaacgtttgctgcgataaatcttttggatttttgtgtttttctaatgagaatactgtttttcattacctaaagaacaatttgctaaacatgagaaatcactcactttgattatgtatagattacataggaagaacaatcacatcagtaagttatagtttatattaaaggtaattttctgttggctcataacaaatataccagcattcatgatagcatttcancattttccaaggt

SEQ ID NO: 952 - DNA, 223 bp, Homo sapiens
acaggaaaacagtagaaatgtctaatttaatttaaagatcaatagacaaatgaaacgtaaaaacaaaatactatgtagcctgtttttactaaattgttgattttttaattgctttatgagcctgttttgcctaaagtgtctatagatctttaactttaaagtcttatctcactttctttagtattgcagaaaaacttaagagtttttctgtttgcttttgtgt

SEQ ID NO: 953 - DNA, 293 bp, Homo sapiens
acttctagaacaaggttaaataaaagtggtgttggtgggcgtccttatttctgatattaatgggaatgagtataatgtataaatatataaccatgattttggtttttttccaagtttttatcagtaatgattgctgagttttatcaaaatttttttggcatccattgagaggattatatattactctttgacacattaatgtggttaattaaagtaaccaacttattaaccttgaaatagtcttagttaaataaaccctacttgtcaatgctatatcattattttaatattgt

SEQ ID NO: 954 - DNA, 511 bp, Homo sapiens
cagaggtgcctgggggaggttagcttccaggcatgagaagagcacaccctgtccacatctgagtcttgtcatccagttcaattacatagagtccagaggggtgcatgtgagctttgagagtgccacattaataagcacacatgataaaagtttgctacataacctcattagaaaagagttatatgtgcctaagtaaaaacaagattttaaaattatgtgtatttatctttttgtttctcccaggctaaagaattacctccaaagccattgtcaagaccacagcagtcatctgcaccagtccagctgaactctggctctcaaagcaatttgaatcaacccatagaagtgacagcgctgtattcatttgaaggacagcagcctggggatttgaattttcaagctggagacagaatcacagttatatcaaaaacagattcacattttgattggtgggaaggaaaacttcgaggtcaaactggcatttttccagccaactacgtaaccatgaatt

SEQ ID NO: 955 - DNA, 285 bp, Homo sapiens
accccgacttccagggacagcagttcattctggagaagggagactatcctcgctggagcgcctggagtggcagcagcagccacaacagcaaccagctgctgtccttccggccagtgctctgcgcgaaccacaatgacagccgtgtgacactgtttgagggggacaacttccaaggctgcaagtttgacctcgttgatgactacccatccctgccctccatgggctgggccagcaaggatgtgggttccctcaaagtcagctccggagcgtgggtggcctaccagt

SEQ ID NO: 956 - DNA, 516 bp, Homo sapiens
actccaaagccctgatcatttcaggactgggaaacttttggacattttccaacctgaggtctggttctttctgaagcagctggtttctctgaaatgaagctgcttcagccccagagatgaggaaaattaaagggataagagacagggctgctccaagccagtgggtctttgcttcagccatgtttgaaagatttccttaaaacataaaaaatatgagttacacaaatgaaacaaactagaagacactatagcaaaagaaataattgatcattgaggtgaggaaaaaacatagtagatattatttcacattaagcttaggataactctttttaaaaattcatgaatattttccacatgattcccacaagcaaaccacaggaatctttagcaaaattattactcattcaccaaaaacttgcatagcattctcttagttaaaacaacagcaaaaacactgatatgagatttcttaaattttattttttcatttacagaacttgtagtttgatgtttagt

SEQ ID NO: 957 - DNA, 484 bp, Homo sapiens
  misc_feature 469: n = A,T,C or G
acttggcccgggtcacgcgtgggtcctctccgggctcgggagtagcatcctcaggagtagtgtagcgagcaaattctggaaagtagtcctcaatcttcgatttcccagcaaggactttctcagcgagcagatcttgcttgttgaggaacaggatcacagagatggtgcgcagccatctgttgttccagatgctcttgaagaggttcagagcctcctgcaggcggttggtctggttgtcctcccggatgaccatgttgtagctgctgctggccactacgaggatgatggcagtcacatcgttgaagcactggatccacttgcggcgttcatcgcgctggccacccacgtcaacatgtggaagttgactttgtccacctggaacttggtctcaaagattccagaagtcaggacacggcagcgaagcaggtcctgatcgctcggcacatagtcagcctgcttgatcacgtcnatcttgtccaggaag

SEQ ID NO: 958 - DNA, 362 bp, Homo sapiens
ccaaatcaatgcctggaggccctgaactagcattagacattcacagggaagtcagctgaggttaaggaaacatccacgcagcatctctgaggatacagaagtgggaggaggaaggtgacagccgcaatgcacacgctgtgtatctgtagcttggactcttcttcaggcagttcttgttttccttccacattggatggtaggggctgggggaggtttgcaaatgatcatgtggaagagaggccttgtgtatcagcctcgcagaagagccaatactgtagacagatatcacccagatgctccatgggccatgcccatgaagcgatgtgacattggtcctctgaacaatggttcagggagctcgt

SEQ ID NO: 959 - DNA, 288 bp, Homo sapiens
accgccggaggaccttcgtccccggcaagggctccaggaagacctacggctccattaacctgcgcatgagacagctcaatggggatgggggccaggccctggtggagaatgaagttgtccaggtctcagagactagccacaccctccagaggtcttaagaactagcccaccttatctggctgctttagctccagtgccacaaggtccaccccctgctcccgcccacctgacccctgccaaggccctggggttttaaactgagctcacatagggccttgtggaagaagt

SEQ ID NO: 960 - DNA, 270 bp, Homo sapiens
accattaatataaaattataatatttatatttataaaattgtatataaaaagtatcaatagactataacctaaacagttttagaaagatatcaacagcttgcaaatataaaaaccttgtgctattaaaaggtgtttaacaaggtagttattaatacatttgttgtgtatataattacaaaagtaaaccaagaaatatttaaaatctttattaacccaaattagaattataaaaatgtttgtctcaaaaacaatgactgtgatactcaagt

SEQ ID NO: 961 - DNA, 497 bp, Homo sapiens
acgtcctgatgaaaacccacttttggataattagaaccgtcaaggcttcattttctgtcaacagaattaggccgactgtcaagttaccttggcagggattccctgcaatcaaaaagatagatgataggtagcaattttggtccaaaatttttaatagtatacagacaacctgttaattttttttttttttttttgtaaataacaaacaccactttgttatgaagaccttacaaacctcttcttaagacatttttactctgatccaggcaaaaacacttcaaggtttgtaaatgactctttcctgacataaatccttttttattaaaatgcaaaatgttcttcagaataaaactgtgtaataatttttatacttgggagtgctccttgcacagagctgtcatttgccagtgagagcctccgacggggcaggtacacacagaaaaacattttataatggaagtcggtttcttggccatctacatagttttctgggcagc

SEQ ID NO: 962 - DNA, 429 bp, Homo sapiens
  misc_feature 164: n = A,T,C or G
acacaggaagtttgtcagcaggatactgcaggctggaggtgggagctgcagctgggcctggattgtggcactaaccgtgggcatgtaaggctgaagcatgacagagagcaaggcagctatattcactgccaagccagtcactgttcctgcccgttgcctgtcancctcactgcctttaatccgcttccagggctcattcacctgaatatattggttgccatgtcgagatatggtgaggatactgcgcaaggcatcccggatccgaaccttctcaagtagctggtgatagtgctggagctccagggtgacatgggccagcaggcgctgatcatcaggggtgagcaccatctcaggcacatagcccccaaagaacttagacacaaacatcccagctctgttgatgaagttgcccaggttgttaagcagctc

SEQ ID NO: 963 - DNA, 360 bp, Homo sapiens
acaaggaatactaatggatcgtcttaaaattggtctaggaaaaaaccttggtgtgtgttatggacaattaactgttaaagttattgtaagttatctgtatttagcagagtattttcaacttgagtgatctgagctgaatttgaagactattaataagttatgtttggaagttttaacttcaatgaagtaattatttgctgtgaaagaaacaaacattgaattactaaacaaagatggtgcaatatctttgttttttttatgaggctcctgagaatcaacccaactgaagcatttcaattcacttgaatgagaaacgtgtttagtatcaaaagagcccaagaagacactggtgtgaaaggt

SEQ ID NO: 964 - DNA, 228 bp, Homo sapiens
  misc_feature 167: n = A,T,C or G
acgaccgggacaactccgggatgatcgataagaatgagctgaagcaggccctctcaggctaccggctctctgaccagttccacgacatcctcattcgaaagtttgacaggcagggacgggggcagattgccttcgacgacttcatccagggctgcatcgtcctgcanaggttgacggatatattcagacgttacgacacggatcaggacggctggattcaggtgtcgt

SEQ ID NO: 965 - DNA, 511 bp, Homo sapiens
acttaagatgcaagtgtccatacagtcttgattagtatggcattagaaacaacagagggctgtccttgatgactaaatccctaaacaacgtcagtgtccagaccatgaattacatattttttgaccatgcattacattattttttaataaatgttcaataaaattctttatagtggaaaattactcaatgaataaccactcaaatcatagttgcctaatataaattctaaacttagctaaaatgaaggcctcaaaaataatttatctacaataaacataccaaactgttacttttaaaaaaagagtttttagacattgctttggaaagaattcctgtattagtttatagaagatgagaggtcacttgacgaaatgggtgacagaactaagacaatggagaaggtaactggctgatctcttttttttacaccggatgtgacttgtcactggacatgctaatgtcagtcgttactccttatgaagcagacacggacaggtctacagcattaca

SEQ ID NO: 966 - DNA, 566 bp, Homo sapiens
acatagaaaacctccgacaacaagctcataaggaagaaagcagcccagattataatccctaccaaggtgtctctgtcccccttcagcaaaaagaaaatggcgatgaaagccacttgcccgagagggattcactgagtgaagaagactggatgagaataatactcgaagctttgagacaggctgaaaatgagcctcagtctgcaccaaaagaaaataagccctatgccttgaattcagaaaagaactttccaatggacatgagtgatgattatgagacacagcagtggccagaaagaaagcttaagcacatgcaattccctcctatgtatgaagagaattccagggataacccctttaaacgcacaaatgaaatagtggaggaacaatatactcctcaaagccttgctacattggaatctgtcttccaagagctggggaaactgacaggaccaaacaaccagaaacgtgagaggatggatgaggagcaaaaactttatacggatgatgaagatgatatctacaaggctaataacattgcctatgaagatgtggtcggggagaagact

SEQ ID NO: 967 - DNA, 477 bp, Homo sapiens
aacccacagaacttttggaagaaaacactgaagaaaagtccaaatcacatttggtccaacccaaattgcttagtaacatggaagcccagcacaatgatctggagtttaaattagccggggcagaacgggagaaacagaaactgggcaaggagattgttagattgcagaaagaccttcgaatgttgagaaaggagcatcagcaagaattggaaatactaaagaaagaatatgatcaagaaagggaagagaaaatcaaacaggagcaggaagatcttgaactgaagcacaattccacattaaaacagctgatgagggagtttaatacacagctggcacaaaaggaacaagagctggaaatgaccataaaagaaactatcaataaggcccaggaggtggaggctgaacttttagaaagccatcaagaagagacaaatcagttacttaaaaaaattgctgagaaagatgatgatctaaaac

SEQ ID NO: 968 - DNA, 502 bp, Homo sapiens
acacctgtaatctgttcctcttcaacaaaggaagcagaagatgcacctgaaaaactttccagagcatctgatatgaaggacacacagctcctcaagaaaataaaggaagcaattggtaagatccctgctgccaccaaggagccagaggaacaaactgcatgtcatggcccatcaggttgtcttagcaacagccttcaagtgaaaggcaatactgtctgtgatggtagtgttttcacttctgacttgatgtctgactggagcatctcttcgttttcaacgttcacttctcgtgatgaacaagacttcagaaatggccttgcggcattagatgccaacatagctagactccagaagtctttaaggactggtcttctggagaaatgaattcagaagaaaactcatcaggtgcttctttttaaaactagaacttggctatattgaatgtgtatttttctttagtgaaatgatgttttatgttattatgtgtgaagtaatatattgt

SEQ ID NO: 969 - DNA, 399 bp, Homo sapiens; identical to SEQ ID NO: 566

SEQ ID NO: 970 - DNA, 268 bp, Homo sapiens
  misc_feature 223: n = A,T,C or G
aagggccccaagaaggactcgggtcaatggagacaaccgcctctagttgtaccccagcctcgttggagagcagcaggtgctgtgcgccttgtagaatgccgcgaactgggttctttggaagcagccccctgtggcggccttcccggtctcgcagcctgaagcctggattccagcagtgaatgctagacagaaaccaagccattaatgagatgttattactgtnttgggcctccatgccccagctctggatgaaggcaaaaactgtacc

SEQ ID NO: 971 - DNA, 279 bp, Homo sapiens
acactagcacgccagtcaccacccagatgcacaggatggagagcagggcaccaaggatctctgctcggtgccatccaaatgtcagccgcttagagggaggcttcgatgacaaccacagggagaagagactgagcaggaaactggtcaggtcaattaagaggtgggcagcatctgtgacaacagcaagactcccagcaatgtgcccacccacgacctctgcaatcatgaaaatgaagcatattgctgaagcagaacagagtttccacttggcataggcgt

SEQ ID NO: 972 - DNA, 415 bp, Homo sapiens
  misc_feature 173: n = A,T,C or G
gttagtggacaagacactgggataaagctctatggctgctggaaggaggtctgagtctgtgtgtgtgcatatgcatgcatgcatgtgtgtgtgtgtgtcctcatttgcagaagtcttgctaccagttagggtgttaagagcatctccactgggcggagacctggcatttgttntccactgttaagagaatgacacaccccctgtcatgtaagggaggagctattgagttagacattttccctatgggaatcctcggtttggtttgtgggaaaggagggaatggataagtgatttttatctctaatcgtcaacacagctgttcttccactgaatttgtgctattgcatacatgtagccatctttcttttcactgcagcagtgtttatcagtagttcaaaatgatttatttgctcct

SEQ ID NO: 973 - DNA, 381 bp, Homo sapiens
actcttcaacaatggatcgaccctagctactcaggaggctggggtggaataattgtttgaggccaggagttccagatcagcctgggcaacatcatgcgaccccatctctaaaaacatctttttaaaaatgagccaggtgtggtagcatgcacccgtagtctcagctactcaggagcctgaggcaggaggatggtttcaacataggagatcgaggctgctgtgagctatgatcgtgctactgcactccagcctgggtgacacagcaagttcctgtttccaaacaacaacaagaaaacaaaacaaaacaaaacaaaaaatagatagaatagtgacaataaaaatggagaaaaagtaggctgactcaggaaatgcttagaaagt

SEQ ID NO: 974 - DNA, 524 bp, Homo sapiens
  misc_feature 431: n = A,T,C or G
acacaaagggacaaggcaaatttcttttttcgtgtgggtagacttagttggcccaagtccttaaaacttttccatataaaaataaaaagtccaagaccagattatttttcttctggtcataaatgctgatttatttacaggtgccttgttcagaccaccattataaacttgggataaaatatgtgtgtattaaagcctcagcatttaatgtcagggtcctttgaagattcactcaagtgttaagacgtttctggaatgcagcgtctctcccccatagtcaacatggttattatatctgtaatctatccagaatgatagaagctaaccttccaagtaacactttgtttttaacttaaatcttttagacatgaaagactccaaaatgacttcattcttgttctaaaaccagcactggagccagctgttgaagngtggtttataaatacagttatcttgtaggctgcttatctgtttataatacagcagacacagatggcagactttgctacatgtaaacaatggag

SEQ ID NO: 975 - DNA, 397 bp, Homo sapiens
gcggcgtgccgtggaaagtggggttccgcagccgccggatcccccagtccagcgcgacgaggaagaggaaaaagaagtcgaaaatgaggatgaagacgatgatgacagtgacaaggaaaaggatgaagaggacgaggtcattgacgaggaagtgaatattgaatttgaagcttattccctatcagataatgattatgacggaattaagaaattactgcagcagctttttctaaaggctcctgtgaacactgcagaactaacagatctcttaattcaacagaaccatattgggagtgtgattaagcaaacggatgtttcagaagacagcaatgatgatatggatgaagatgaggtttttggtttcataagccttttaaatttaactgaaagaaagggt

SEQ ID NO: 976 - DNA, 231 bp, Homo sapiens
acttggccaggatgctagttaaataccctgagatcattaattcaaaccaagtgaagcgagttcctggtcaaggctcatctgaagatgacctgcaggaagaggaacaaattgagcaggccatcaaagagcatttgaatcaaggcagctctcaggagactgacaagctggccccggtgagcaaaaggttccctgtggggcccccgaagaatgatgataccccaaataggcagt

SEQ ID NO: 977 - DNA, 483 bp, Homo sapiens
  misc_feature 167: n = A,T,C or G
caatgatgaggccttatggaacaagtgccgagagcctctcaatgtggttccctggaatctgaccctcttctccatcctgctggtcgtaggaggaatccagatggttctctgcgccatccaggtggtcaatggcctcctggggaccctctgtggggactgccagtgtngtggctgctgtgggggagatggacccgtttaaacctccgagatgagctgctcagactctacagcatgacgactacaatttcttttcataaaacttcttctcttcttggaattattaattcctatctgcttcctagctgataaagcttagaaaaggcagttattccttctttccaaccagctttgctcgagttagaattttgttattttcaaataaaaaatagtttggccacttaacaaatttgatttataaatctttcaaattagttcctttttagaatttaccaacaggttcaaagcatacttttcatgattttt

SEQ ID NO: 978 - DNA, 370 bp, Homo sapiens
cacaagcacaatgatcatttttatttgtttgtttgtttgaaacttcagcagaatagatatctgcatgctttatgaagttgttgcttcggtaagagcccatgggatgccagaaattaacatttctttgctgccatgggctgatgatgctgctattagataaagtttagctgtggcaccaagtcacatcattttcatagaaaaagattacttgtagcttattttagaagtatgaccttttggtctgtttgattgattgattgattagaattgcaataaaagaaaagcttgcattcataaggcattcattctgttgtaaatgttcaatatatttattttgagagcaaggacctgtggttgtaaacaggtgtgg

SEQ ID NO: 979 - DNA, 405 bp, Homo sapiens
acaaacagctgagcaatctgggctgggattttatcacacagcatttttaattgataaaatttccttctctcttcttttgttctgtttttgttttgtgtgttttttttttgtttgttttttagaaaaaggggtgggggagaagaaataaaatcagagaaaaatgcccaaaaacattttccacaatatctaaaaacagagaaccatagttcttgtcaagacaatatgaattctggatgagttattttttccagttttcaacaccaataaagatttttgcaaaagccaccacatcagaacactcatcttccagatcaaataaccttccccttttgccttcacttgtcatttttcataaaaggataaaaggatgtattctgttcttgcaaacaataagtgctaacaaca

SEQ ID NO: 980 - DNA, 354 bp, Homo sapiens
gcctacaccacaagcagcagctggagagagaccccagggtaaagatggctttgcagcaggaaggatttgaccgaaaaaagcgaggttacagagacatcaatgagatcgacatcaacatgaacgatcctctttttacaaagcagtggtatctgatcaatactgggcaagctgatggcactcctggccttgatttgaatgtggctgaagcctgggagctgggatacacagggaaaggtgttaccattggaattatggatgatgggattgactatctccacccggacctggcctccaactataatgccgaagcaagttacgacttcagcagcaacgacccctatccttaccctcggt

SEQ ID NO: 981 - DNA, 300 bp, Homo sapiens
acaatgtgatgttgatatatgtttaaaatgtggaatgattaaatcaggctaatttactttttttttctaaaaggactttggcttcagaattaactttaattttcattccactttgcttatattatcttggcaagatcagtcctttgtagcaaggccaggatttaagctttgaaccaccagtaaggagggcattggtttgagcctgctttcaattttgtccaaaatccagttattcgtattttacctagttcccagtaactcacaatacaatccaagaatgtgccttattgctggcctggt

SEQ ID NO: 982 - DNA, 275 bp, Homo sapiens
  misc_feature 254: n = A,T,C or G
acaagtatggggtaattgcttaaacatgcctggtggaagtctgatagcgtctctgcacgtgacctctgacaaagcccatcccaggagacggggtgaagctattccccacactctcctgtgaacactggagtcttgcaagacccagggagaacccactgcttttcccaggaggctccaggattaggaaatgtgtgtatttagtgaaaaataggtttgtagtgaaatagttactatttcatgaaagtagatatttntagaatttttgaaataccaca

SEQ ID NO: 983 - DNA, 327 bp, Homo sapiens
  misc_feature 214: n = A,T,C or G
agaggtgccattagcagaatttgccaagatccgagaaaaattttagctttagttctatttcagcagtcacctgacgtccttgtctatggtcttaaaaacaagaaggcacacatttgataagatgagattaaggttaggagaaaacctcagtcattgcatgctttttagtatgggccaataaaatctcaacacctgtgggagagtaagaactaanggaatgagtttgggcggcccctcataaaggaccttagaggcagggaacagcaatgccaaatttccctctctcgtgagatgggggatcctgtgcaggctgatgaggcacccatg

SEQ ID NO: 984 - DNA, 380 bp, Homo sapiens; identical to SEQ ID NO: 749

SEQ ID NO: 985 - DNA, 374 bp, Homo sapiens
acaaacatgctcagaacttgctgggacagtgtgggtgggagaccagggctttgcaattcgtggcatcctttaggataagagggctgctattagattgtgggtaagtagatcttttgccttgcaaattgctgcctgggtgaatgccgcttgttctctcacccctaaccctagtagttcctccactaactttctcactaagtgagaatgagaactgctatgatagggagagtgaaggagggatatgtggtagagcacttgatttcagttgaatgcctgctggtagcttttccattctgtggagctgccgttcctaataattccaggtttggtagcgtggaggagaactttgatggaaagagaaccttcccttctgt

SEQ ID NO: 986 - DNA, 510 bp, Homo sapiens
gccagttcagctaggcaaaagccatacttttcacaattaaaaaaaaaaactattctgactagagtcaggtttctcatatccatcgtgataggaaggcctaagaatggcaaatcgctttgagatataatattgaacttcagtatgaatgtgaccgaatctgaaactttgggaatttgctttagccagaataaagaaaccaaatcatgaaaattatggaagactattctgccacctgtgccccaagttggatgagcaaaccactttggatcagttcacagcattaactacaagtgaactgatcatcttctctatattcatttcacaagagctggcttaggtggggtaattaaattgccaccttcgtggttgtaaaagacaaacaaaacatggcaaatttcattaacacaaaatttcatcaactgctatactgaattatgtttagaagattctgaaagcaagattatccagtgggtaaatgagagtcgactggattctgtcagttcaaaaagg

SEQ ID NO: 987 - DNA, 453 bp, Homo sapiens
  misc_feature 256: n = A,T,C or G
accctaagggtgccatcttcctgttctttgcagggaggattgaagtcattaaaggcaacattgatgcagtcatccggcgtttcgaggagtgctgtgaggcccagcagcactggaagcagttccaccacatgtgctactgggagctgatgtggtgcttcacctacaagggccagtggaagatgtcctacttctacgccgacctgctcagcaaggagaactgctggtccaaggccacctacatttacatgaaggccgnctacctcagcatgtttgggaaggaggaccacaagccgttcggggacgacgaagtggaattatttcgagctgtgccaggcctgaagctcaagattgctgggaaatctctacccacagagaagtttgccatccggaagtcccggcgctacttctcctccaaccctatctcgccgccagtgcctgctctggaaatgatgt

SEQ ID NO: 988 - DNA, 614 bp, Homo sapiens
  misc_feature 512: n = A,T,C or G
acctggagcatcattctcttctaccacatctgaatgtaacttaaatttgctcaaagaagcaaaatattttttaaagttattaataattgctatttttgtagtctttgcttgacttttttgggggggattagcaaagcagaaaactggctgctgggttctgtagttttaaaaaatctatatttttagtcataatgagaagtctattttcaccaattatggaaacatacagtggagcaagtaaaccacttattccagctataatattatgaagaacatttcccatgcatctacaagcttgagaaataggattttcacagtggggaagtgggttacaatattggaataggaaaatttgatgctgtaatttgggtcctgtatttttccaaacaactgtgcttcttcagcactaatatttctgggatttaaatagtaatgtttaaattatggtaaatgtaatttaaaacatctcaattaagtctgtctatcaatattgttcttcaagcatgttttanacctagaaaagtatggtttgggggaggctattttattgtgtggttagcacaaggaatctaatttatagcaagtgtgaaatagttaccattttttcctgatct

SEQ ID NO: 989 - DNA, 230 bp, Homo sapiens
actggccttaggcgccggcttttcccagctcacaaaagcatcgggcagtgcctatctaggggcgcgggcagtaacgagttttcagtgatcaggagagtgtcggggcaaaggtgaagaaatcgtgactaactcagcagagttggggtggggagctccaggaaccacttctgctgggtgggctgctatcagaaactcagccaagaggaggggagttgtttgtttaggtttgt

SEQ ID NO: 990 - DNA, 441 bp, Homo sapiens
actgaggaatgaatagaaaggcttccagatgtctaaaagattctttaaactactgaactgttacctaggttaacaaccctgttgagtatttgctgtttgtccagttcaggaatttttgttttgttttgtctatatgtgcggcttttcagaagaaatttaatcagtgtgacagaaaaaaaaatgttttatggtagcttttactttttatgaaaaaaaattatttgccttttaaattcttttcccccatccccctccaaagtcttgatagcaagcgttattttgggggtagaaacggtgaaatctctagcctctttgtgtttttgttgttgttgttgttgttgttttatataatgcatgtattcactaaaataaaatttaaaaaactcctgtcttgctagacaaggttgctgttgtgcagtgtgcctgtcactactggtctgt

SEQ ID NO: 991 - DNA, 565 bp, Homo sapiens
acaataataattatgagtttgcttatgtaatctcacctcacctggatgatcactaatactaattcatttattactaaccttctggcttccttctctcaatatgcttacaaagtctccagtcacctacaatgctggctttctcccactgagtttgctgtttgcaatttttccatgaagtttgaacttcataaggtaattcatggcattgaactggttcatgaaaagaacactagagtctgtcatttgctttggcttgaagtatggttggtaacacaaattttcacctgctcttctaccatttgaatttgtgtagagggtgtttgcagagcaatgcccgtaatgcttagagaatgttctcctaaaagacttgcggaatcactctgtccttggaagtttcatatattgtttgatatgaagtgttagatagaatttccaatattggagcatatcaaaaagtattaaaactaaaaaggaccagagaattcttagattggcccggaaaggccaataaagagttaaaatgaaaactcattacttttccattcccaatctagtgctagatgta

SEQ ID NO: 992 - DNA, 350 bp, Homo sapiens
acatttttagtgacattttaaaagcagtcagattttataaatggcaagtaagcctgaagtgaggatactgcaattttcggagaaaagaacagcagctctttaagtgtttgcattttctatttggggggcagggaactgtcattcattttgcacaattcttgaactgatgtcagcacccgagtggctcctgaatttaagtctgggacgacatcttttatttttacatgaatctttaaacaattctgtgagcaaagtttgtagctgctggattattgtctgtctttatagcaagttccagtaaaccacaagtatggcaaagcttatccaattttatgcttggagcagtcagt

SEQ ID NO: 993 - DNA, 399 bp, Homo sapiens
accacttttatcacaatggccttgcaaaggccaagagaagacgcagcctacaccacaagcagcagctggagagagaccccagggtaaagatggctttgcagcaggaaggatttgaccgaaaaaagcgaggttacagagacatcaatgagatcgacatcaacatgaacgatcctctttttacaaagcagtggtatctgatcaatactgggcaagctgatggcactcctggccttgatttgaatgtggctgaagcctgggagctgggatacacagggaaaggtgttaccattggaattatggatgatgggattggctatctccacccggacctggcctccaactataatgccgaagcaagttacgacttcagcagcaacgacccctatccttaccctcggt

SEQ ID NO: 994 - DNA, 223 bp, Homo sapiens
acagccctgctatagaagggcattgcaacaacatacattgcttggccaaagccatcaaccagattgctgcagctttgtttacaattcacaaaggaagcattgaagaccgtcttaaagaatttctggcgcttgcatcctccagtctactgaaaattggccaggagacagataaaactacaacaagaaatagagaatctgtttatttactgctagatatgattgt

SEQ ID NO: 995 - DNA, 268 bp, Homo sapiens
actccaaagccctgatcatttcaggactgggaaacttttggacattttccaacctgaggtctggttctttctgaagcagctggtttctctgaaatgaagctgcttcagccccagagatgaggaaaattaaagggataagagacagggctgctccaagccagtgggtctttgcttcagccatgtttgaaagatttcctctttttgtttatatggcagaggagctccacagcatattcctccccgttctccgggcgagcttctcgggccg

SEQ ID NO: 996 - DNA, 345 bp, Homo sapiens
accctcctccacgtgattcctacagcagttcaagccgcggagcaccaagaggtggtggccgtggaggaagccgatctgatagagggggaggcagaagcagatactagaaacaaacaaaactttggaccaaaatcccagttcaaagaaacaaaaagtggaaactattctatcataactacccaaggactactaaaaggaaaaattgtgttactttttttaaattccctgttaagttcccctccataatttttatgttcttgtgaggaaaaaagtaaaacatgtttaattttatttgactttcgcattgcttttcaacaagcaaatgttaaatgtgttaagacttgt

SEQ ID NO: 997 - DNA, 434 bp, Homo sapiens
acccattaagtaatccttcatcatccaccctgccccctttattctaaaccagctcttgcaatggcagtgagactcctttttgggccattccctcttcagacattttaactcctgtgggactgccagcagggtgatgttgaggtccagtgtggagaagcgtccaatctgacagtgagtggcaagacaaccaaagggaagaggcctagttccaaaaagaactagagcagaggtgtattagtccattttcacgctgctgatgggcaatttacaaaacaaagaggtttaattggacttacagttccacatggctggggaagcctcacaatcatggcagaaggcaaaaaggagcaagtctcctcttacatggatggcagcaggcaaagagagaatgacgacacaaaagcggaaatccctgataaactatcagatcttgt

SEQ ID NO: 998 - DNA, 345 bp, Homo sapiens
accttccccagcttcttcacagaggtgtaagttttggtttgtttacctcctattacctcatggagaagtagaggttttaaaactcaaaaagtgggcagagaaagatattatgctaagcaaggaaggtaattgttatccccacttttcagatgaagaaagagtcagagagtttaagtgacttgcgcacaatcacattacaaatagttagtggaactaggaccacaagcaaggtcttctgaatcctacatcacagggcagatctcattttcaacttaggcatatttcaaaagtagtagaaagtttaatttagaatatgtctagtgattccccacttcctaaactggt

SEQ ID NO: 999 - DNA, 534 bp, Homo sapiens
acccccagcgatggagtgacacagcacgaagccctgtgtgtatacaggaataaacagactcagtttctcctgccacactctcacaacacaattctgataccagatgggtggggtcttaccacacacatcaggtaagcagtcaattctacagtagatgccagctgggtatccactaattcacttcaattctggactacctacagactgtccctgacttaggatggtttaatttaagatgttttggctttatgatgggtttatcaggacataatcccatcttaaatcaagaagcatctgaattacaatggttcaatttacaatttttcaacttcatgatgggcttattgggttataacctgatgcatttctacttacggtattttcaatttttttttttttttgagacggagtcttgctctgtcacccaagctgtagtgcaatggcccgatcttggctcactgcaacctctacctcctaggttcgagccattctcctgcctcagcctctcaagtagctgggactacgggcatgtac

SEQ ID NO: 1000 - DNA, 495 bp, Homo sapiens
actaatatcccttaatggcagaatgtgataatcatggaattaattattgctaaagtagttttcaaataaaaaaaagaaaaaagaaaacaaaacaaattaaacttgacacaatctgaccaaacacgtgtcaatttacaatttcaaggttattttacaaaatacctacatttacacaataggctcccggcagcatttccagacaaatgttcttttaatttatcctgacatgctataaatgaataaattacactatttaaaaattatcatcagtaagttttcctttctcatgggtcagagaaaaagaaatgagcgtgcaaagaagattgagaggaagcgcacgcacacagataacttaaagaagcaggaggggctggggagggtcaacaatcactgaacctcacacagtgtgatgctctccaagggtgaaagtcaactgcttatagccatttcaaaagtattttaaagaaaatgttttgtagggaaaccctttaatgc

SEQ ID NO: 1001 - DNA, 494 bp, Homo sapiens
acatacattatgcctgatatcttaagaattctctctttacaggacaggaaaaaatgaaaattcgagtatagttttaaaaatatccaaactcttcatgatctttctagataaggctttggccttatagaataagtataagtgtgataacttcttggtgacaagaaacaaaagggaaaaaagaaggctcttaagaaaaataggtattactaatgttaatgaatacaaataaattctcatgaagtagataatgaatttgagagtttcgttagaaaacatgtccttttttattccttccaataacctctggagactccaacaataaggaaaatatattcttacaaacaagagtatagtaatactgactactcattgacacttccattcctgagagatatttaccagacttaaagttaggagaaaactttagctattgatttatcacttaaagtagcttacatgttttaatacaacctagctattcttaaagctagagt

SEQ ID NO: 1002 - DNA, 443 bp, Homo sapiens
actctaaatcattaagcgtttggagtaggcttcccaatccttgcccctaatcccctatgtcattgttctaagtgagtgcacatgacgtgttctgctggaccatgaagagatggctaaaactaagctaatcctgttccctgcctctttgtaggtaatgtgaggctacaggagatgatggcaacaatgtgccaggaacgtggagcccggctttttgctacagatgagagattctgtattgacaatggagcgatgatagcccaggctggctgggagatgtttcgggctggacacaggaccccactcagtgattctggggttacacagaggtatcggacagatgaagtagaggtgacctggagggactaataagatcaacagaatcagagtagatagttccttaatcggaacccaaaggaccccgtgcctcaatctctatcctgatg

SEQ ID NO: 1003 - DNA, 379 bp, Homo sapiens
cacgggtctctcaaagtgctgggattacaggcgtgagccaccgcacccggctttttttttttttttaaacggagtctcactctgtcacccaggctggagtgcagtggtgcaatttctgctcactgcatcctccacctcccgagttcaagcctcccgggtagctgggattacaggcaccgccaccatgcctgactaatttttgcattttcagtagagatagggtttctccatgttggccaggctggtctcgaactcctgacctcaagtgatccacccacctcagcctcccaaagtgctgggattacaggcataagccaccatgcccggcccaaatgggctaatgttttaaacagatccttcttgtctgccctgtaggagg

SEQ ID NO: 1004 - DNA, 413 bp, Homo sapiens
actagtgcttgccacctggtcaccagacctccaaatatggctgccaccaccaggacctttccagttactccttatatgtgtgttctatggaggggcagggaaaaggtggcacttgtgagtgtgtgtggattggcagggggcccattcactttgggttccatcttgctttaaatttcttcattttgattaagagacctctttttgatctgtattgggctaaccagagccaaatacttttgaagagtttcccagggactagtcatggtaatagcatataattgatctgaatgagatggagagaagaatgaaggggtggtggttctgggtttgatttgagttcacctgtgggcagtgggcagtgggcagtgtcttggtgaaagggaacggatactactttttgcctcaccgtaagt

SEQ ID NO: 1005 - DNA, 502 bp, Homo sapiens
  misc_feature 498: n = A,T,C or G
acttactttttaaagtccaaatatgtttatatttaaatatacgtgagcatgttcatcatgttgtatgatttatactaagcattaatgtggctctatgtagcaaatcagttattcatgtaggtaaagtaaatctagaattatttataagaattactcattgaactaattctactatttaggaatttgtaagagtctaacataggcttagctacagtgaagttttgcattgcttttgaagacaagaaaagtgctagaataaataagattacagagaaaattttttgttaaaaccaagtgatttccagctgatgtatctaatattttttaaaacaaacattatagaggtgtaatttatttacaataaaatgttcctactttaaatatacaattcagtgagttttgataaattgatatacccatgtaaccaacactccagtcaagcttcagaatatttccatcaccccagaaggttctcttgtatacctgctcagtcagttncttt

SEQ ID NO: 1006 - DNA, 326 bp, Homo sapiens
accttttcttcccatcaaaaatgcattaacaagatcatgcttatagttagtcagcacaagaaaaaaacgacaatttatactgaactatttaagtcttgcagtagagtgctcacaactccgagctgtatctgttaaccttttcaatagcattcattatgtgacattgtcaccaattacagtaaaagaacttcactaatttttgaaagctagaattactcaaaaaattctgcattgtaaataataccaggaatattgcatttaagcctaggatggcaaaattacttaaatcttttctatacttttttgtgtaatataggtaggaaaat

SEQ ID NO: 1007 - DNA, 363 bp, Homo sapiens
actcagcccatacttctcttttttccccagattgtgtcagccaagtcaggccaaaatgtgcccccccacagcagggaattagtgaccatgtggaggtgcaggatgtcggtcttccttctgatggtttgggactgctggacccaggctgccaggcaagctggtttctcctgcacaccagtgtgcagtctggtggatgctggtggggagagggggattctctgagcatgaccatgagaacacccaagaaagcgggacttagctcacaaagctattactagtgctttctgtcacccaggctggagtgcagaagtacagttctagctcactgcagcctccaccttctgggctcaagcaattctccca

SEQ ID NO: 1008 - DNA, 448 bp, Homo sapiens
acattttgaacatatttatgtgctatggaaggaaatgctggtgactaaaataaggtttactctgaaagaggaggaattttattcaaagcattcaaacattttattcaagtgtttcaaaattcaaagcattgtattcaaagttgcagtgaaggcatcaacttatgtaaaaactcagaaggaaggctcctctgataaaaacacagctcctttattatgctgcttttcttgttcactttacacactaagtaaacacttattgtcaggtgcctagtcttgagtgaattgttagatgtgcactgaactcgggatgttggggattggagagagagaattgccaaagtaacagcaaaaatatctcttactttgctttgtttataaataaattagtagattggaaaaactagtgttagggaaagaaatcacatgttcagagcctaattcagtagga

SEQ ID NO: 1009 - DNA, 486 bp, Homo sapiens
acttcctggacaagatcgacgtgatcaagcaggctgactatgtgccgagcgatcaggacctgcttcgccgccgtgtcctgacttctggaatctttgagaccaagttccaggtggacaaagtcaacttccacatgtttgacgtgggtggccagcgcgatgaacgccgcaagtggatccagtgcttcaacgatgtgactgccatcatcttcgtggtggccagcagcagctacaacatggtcatccgggaggacaaccagaccaaccgcctgcaggaggctctgaacctcttcaagagcatctggaacaacagatggctgcgcaccatctctgtgatcctgttcctcaacaagcaagatctgctcgctgagaaagtccttgctgggaaatcgaagattgaggactactttccagaatttgctcgctacactactcctgaggatgctactcccgagcccggagaggacccacgcgtgacccgggccaagt

SEQ ID NO: 1010 - DNA, 469 bp, Homo sapiens
  misc_feature 457: n = A,T,C or G
gccacccagggcaaccaggccctcctggacctcctggtgcccctggtccttgctgtggtggtgttggagccgctgccattgctgggattggaggtgaaaaagctggcggttttgccccgtattatggagatgaaccaatggatttcaaaatcaacaccgatgagattatgacttcactcaagtctgttaatggacaaatagaaagcctcattagtcctgatggttctcgtaaaaaccccgctagaaactgcagagacctgaaattctgccatcctgaactcaagagtggagaatactgggttgaccctaaccaaggatgcaaattggatgctatcaaggtattctgtaatatggaaactggggaaacatgcataagtgccaatcctttgaatgttccacggaaacactggtggacagattctagtgctgagaagaaacacgtttggtttggagagtncatggatggtgg

SEQ ID NO: 1011 - DNA, 242 bp, Homo sapiens
  misc_feature 14, 49, 63, 124, 135, 160, 173, 187, 232: n = A,T,C or G
actcaaatttctcnaataccccaccaaatcattctctcctccttaccantattataatgtccntgacaataacataacaaacccagctctaacacctacagatttctttgagaacaaacaactnctacatgcaanttcttttctatactcaccaactggntttcttcaacctnctgcccaccctgtncagctcaggacatcaacaaccctttatggaaaccaccgaggtcanactggatgca

SEQ ID NO: 1012 - DNA, 507 bp, Homo sapiens
  misc_feature 456: n = A,T,C or G
acgacaggtcagaaacttaagttacaaaatagagtcaatattacaattaacacagagaagtaaaaaccattgctctcagattctgcacacttaaaaaaacataaactttatacagtaattgaaattacgcatttctactcagattattagagcatattacaaacacacagaagcctaaacagttatggtcacattttggttttgttccagtggtgcacgatcacatgaaatgttacatccgttttgtgtgaaataaacatttggctgaagtgcaatagctgctgcattaaaaatatttccataaaaatgcttagattaaaatcttcctgaacattagggttctaatgttcaggattattttaagagtccttatgaagagtccttaaaaattatagaaatagatgtagttaggaaatttcagtgtgttttgtctgtttttttttttttacatgagtnaacaaatactggatttaaagtgcagcgcctttctcctctcccttcgatttt

SEQ ID NO: 1013 - DNA, 238 bp, Homo sapiens
actccaagttgtcaaagcatcaacaatgaaaattcgattaggaaactttatttaaaatttcaggtagtaatattcagtgtagttaaggccagtcttaacccactggatgaaaatctaggactgtatggaagtaagcaaacattacatttttaggtggaaatagtcagccttgcataaaaacaaggatgcgtgaaagccttaaattccagctcccttttactggagtctgtggttgtgt

SEQ ID NO: 1014 - DNA, 464 bp, Homo sapiens
acccctgcctacagaaaagaagagggaacatttatttaaaggatggaaagactgggagttaggcactcccagcctcactgaggggcatttttgcctttgagaagtcctcccaggtatcctggtatagcacaatgtggcaatccgtagtgggaatgaagattaaacaggagagactttgtattagacctgtgagacgagttaggaagccctgcctggcatggggaatgcaaacagggaacattcaataaatcggggaacttgcttttctccccaagaccccagatggggcctacccatcgttctcgtgtaacaaaacgtgtaaaaaaaaaaaaggaaaaaaaaaaacaaaacaaacaaaaaaaacacctgaggcattaagtagataccctagaaagatcaagccttaatagatgggccaaattagccctgtagtaaacactacattagacacattctagcagatc

SEQ ID NO: 1015 - DNA, 394 bp, Homo sapiens
actttgggaggccaagatgggaagaagattgtttcaggccaggagtttcagaccagcttgggcaacatagcaagactccatctctgcaaaaaatataataagtagccaggtatggtggcatgtgcctgtggtcccagctgctcagggggctgaggcaagacgatcacttgagcccaggagcaccaggctgcgatgagccctgctcacgcaacggcactccaacctgggtgacaaagcaagactgtgtaaaaaaaaaagggcacataggaattgggtggcaaattcaagcctatggtgcacacaaaaatacctgcaaaccacaaataaagaaatggaggaggcaatcggtgcgggtctttggacacaagaagacagccacagctgtggcacactg

SEQ ID NO: 1016 - DNA, 356 bp, Homo sapiens
  misc_feature 310, 349: n = A,T,C or G
cacaaagttggtgccaagcttcttgaataaaacgtgtttgatggattagtattatacctgaaatattttcttccttctcagcactttcccatgtattgatactggtcccacttcacagctggagacaccggagtatgtgcagtgtgggatttgactcctccaaggttttgtggaaagttaatgtcaaggaaaggatgcaccacgggcttttaattttaatcctggagtctcattgtctgctggcaaagatagagaatgccctcagctcttagctggtctaagaatgacgatgccttcaaaatgctgcttncactcagggcttctcctctgctaggctaccctcctctanaaggctg

SEQ ID NO: 1017 - DNA, 209 bp, Homo sapiens
accgtcaaaagacttgaagaaatttcatgattttgcagtgtggaagcgttgaaaattgaaagttactgcttttccacttgctcatatagtaaagggatcctttcagctgccagtgttgaataatgtatcatccagagtgatgttatctgtgacagtcaccagctttaagctgaaccattttatgaataccaaataaatagacctcttgt

SEQ ID NO: 1018 - DNA, 405 bp, Homo sapiens
acagatttagatcttatgggacttcaacatttgggattatgacgttcaggattgtgtcttcctgggctgtggcccaaacccgtgtggtccaacactatttcacacaagaggaaagcaaaccacgtgcatagatgcaatgaaggcttaaatgggcgtcacgtatagattatatcccaggaaaacatgattaagatgatacatggcggctttttttcccagtgaaaaagatccacattctttttcttgtgtggaattaaacacaatttctgaatcaatgtaagtgtatgcaaatcaccatattcacttagctgatgctcctttattaacaggaatagaagggaggtcattcgaagagatgatggcgcgggacccaggacctgaggaagctgcagtgggtgaagggga

SEQ ID NO: 1019 - DNA, 531 bp, Homo sapiens
  misc_feature 81, 82, 185, 209, 283, 446, 447, 482, 513: n = A,T,C or G
actgaatttgaaagattccaagcccttcccaactcaaagagtagaaacacatgcctccattttaaatcatctttcatttgnnaaaatacatatatgtttcatggaaaaaacacatttccatcaagctagagggaggattgctattttgcatcttttttgcaatgcacattctccaacagataatncacgtgtgaagtttttttgccctncttccacacaaatctgttattacctttttctttctttttaacttttaattgtattgttttgttttaatgcccanatagcacagcattcctcctttacttgccttttcacaagcccgtaatcaatatctgtaaaagttaaaattagtttccacagaaacattgatttcaaagcaaacactatcttaatgagcctaactctggtaaattaaaaatataaatggcactattaagagaggnnaaggaaacaatacgtaatatttagcaggatctctnatattctaatttcagaagtgttaactgtgtnacagttacaggacctatc

SEQ ID NO: 1020 - DNA, 373 bp, Homo sapiens
ccgcagtaggctcctcgggctgcccctcggttgacaatggtctccaggatggtctctaccatgctatctggcctactgttttggctggcatctggatggactccagcatttgcttacagcccccggacccctgaccgggtctcagaagcagatatccagaggctgcttcatggtgttatggagcaattgggcattgccaggccccgagtggaatatccagctcaccaggccatgaatcttgtgggcccccagagcattgaaggtggagctcatgaaggacttcagcatttgggtccttttggcaacatccccaacatcgtggcagagttgactggagacaacattcctaaggactttagtgaggatcaggggt

SEQ ID NO: 1021 - DNA, 488 bp, Homo sapiens
accttcctccccgagtagaaatcaagttataaacggccaaagtagcctattccaaagggcagattttaatatttcaaattcacttccttcccacataagaagaatgtgaagaggagaaaattattcacatgctcaaagttttagcaggtttgagaaatggttttggggtgattattttaaattattggctatatttgttctgcttaaaatgtttcaatcaaagtgacttgaaaggcagagacaactgcattaagatacaattaaaaacttatttgtgactcagcctatgttaaatactacaacttggaaaataaagcagttttcttacagaaatatcattcttaaactgggattgatagttaactttaacccacgcatttgaagcttatttttttacatactaaagggtatgttgaaaagagccagtaattttaggtaattgatttcttcctaaatgacgaattagaatttcatctaatttgtacctg

SEQ ID NO: 1022 - DNA, 305 bp, Homo sapiens
actgttggccatgtcttcatcagtggctggagacacggccagaacggcaagagtgtccagtatgtaaagctgggatcagcagagagaaggttgtcccgctttatgggcgagggagccagaagccccaggatcccagattaaaaactccaccccgcccccagggccagagaccagctccggagagcagagggggattccagccatttggtgatgccgggggcttccacttctcatttggtgttggtgcttttccctttggctttttcaccaccgtcttcaatgcccatgagcctttccgccggggt

SEQ ID NO: 1023 - DNA, 231 bp, Homo sapiens; identical to SEQ ID NO: 772

SEQ ID NO: 1024 - DNA, 489 bp, Homo sapiens
gaatgggcaaaatggggaaagggccaccaggctttttgagaaacctcttgattctcagtctatttatcagctgattgaaatctcaaggaatttacagatacccccagaagacttaattgagatgctcaaaactggggagaagccgaatggatcagtggaaccggagcgggagcttgaccttcctgttgacctagatgacatctcagaggctgacttagaccatccagacctgttccaaaataggatgctctccaagagcggctaccctaaaacacctggtcgtgctgggactgaggccctaccagacgggctcagtgttgaggatattttaaatcttttagggatggagagtgcagcaaatcagaaaacgtcgtattttcccaatccatataaccaggagaaagttctgccaaggctcccttatggtgctggaagatctagatcgaaccagcttcccaaagctgcctggattccacatgttgaaaacag

SEQ ID NO: 1025 - DNA, 473 bp, Homo sapiens
gaaagcttatattttagtaacaccacttaaatctagaaaagtgatagagcaaagatgcatgaggtataatctgtccgctggcaccatcaaagcagtaacagattttgtaataccagagtgtcaaaaaaaagtcccatcagcaagtccatggggactttagaaaatacatttgaaggtcataaaagtaaaaacaaggaagattgcgatgaacgtgacttacttactgtcaaccggaaaataaaaatatctaaccttgaaaaggaacaaatgctcacctctgactttaagaaaaataccagactattaccaaaattgaagaaaatagaaaatcaggtagctatgtcattttataagcatcagtcctcaccagatttgtcaagtgaagaaagtgaaacagaaaaggaaattaaaaggaaagctgaagttaagaaaaccaaagcaggaaacaccaaagaagcagtggttcacctgag

SEQ ID NO: 1026 - DNA, 447 bp, Homo sapiens
accagaagttgcatgcagctcatttaatctttcatgggtttgaagcccccacactacatactaacacttcctaaaggcttctcctggtcctatcaacatctgggtaggggtgaggctggagtgataggtcactatgaggttggggtggaacaaaacagtcccatggtttgacttggaattaactcagttgctagcatactgagagaaccagtgagcacaggtggtggtgtttataatagttcattacaggagcccgggtgcggtggctcacacctgtaatcccagcactttgggaggctgaggcgggcagactgcctgaggtcaggagttggagaccagtctggccaacatggtgaaaccccgtctctactaaaaacacacaaaaaaactagctgggcatggtggcatgcacctgtaatcccagctactagggaggctgaggcagga

SEQ ID NO: 1027 - DNA, 488 bp, Homo sapiens
actgaacactacatgctatgcactgctccaacatttttaagtgtcctaatttattaaactctcacacatttgaatagggaggtttcactgatcaggaaatagaggatcagagcatttaagtaactagctcgaggtcacagagctaataaagggaagagctaagattcaaactcagacaatctagcttcagaactgatgcttaatgtgtaaacatcctttctttcatgtccttcaacattcccatttcccatctgtaaccaaacatatggaaggcataaatttcttttatgggtcctaacatcaccacagagccctagataaatcttaagtaggtgctggatgatggtgaagcatattaaaaatggaggctggtggtaaagttgacctgatttcactactcagaagaacagagtgttgctttgaaagacagacataaaagaatgtagatgacaggttgatgagtgcagcaaaccaccatggcacatgta

SEQ ID NO: 1028 - DNA, 326 bp, Homo sapiens
acttccctgaaaaccacgtgtaagaagtgatgcttttgccagtggatgatctggaatgcgaccggagcacttgctctgaggaatcccagggtgactctgtcggggagcaatccggtcacagcctcccctcagagacaggcctcagttcgagggcagcccattatctgtcgcagacatctgccatgtccctgagactgcgggaggcaggggatgcttgggtgtccccatctgtccctggtgagaagcaaggctagctctgccttccacatgcttctcaggatgccaagaggcctaggaacccagaaacccccttggaggagctgtgt

SEQ ID NO: 1029 - DNA, 285 bp, Homo sapiens
actggtaggccacccacgctccggagctgactttgagggaacccacatccttgctggcccagcccatggagggcagggatgggtagtcatcaacgaggtcaaacttgcagccttggaagttgtccccctcaaacagtgtcacacggctgtcattgtggttcgcgcagagcactggccggaaggacagcagctggttgctgttgtggctgctgctgccactccaggcgctccagcgaggatagtctcccttctccagaatgaactgctgtccctggaagtcggggt

SEQ ID NO: 1030 - DNA, 493 bp, Homo sapiens
acgaaatgctccccagtttagatttgactggtttatcaagtctaggactgccatggaattccagagacgctgtaacactctgatttcattgattgagaaagaaaatatggaaattgaggaaagagagagagcagaaaagaagaaacgggcaactaaaactccaatgatttaacattgttgggccatttaaaatgtgcatattggagcagaacattaaatctgtttccattttagtcacagaaaagaaaagcagagtcagctactgagagctctggaaagaaggatgtcaagaaggtgaaatcctaaagcctagaaataaagttttaaatgggaaactgctattttcttgttcccatcttcaaatgctaattgccagttccagtgtattcatggtactctaagaaaaatctctttggttttgatttcttgcatattttatatattttacaatgctttctacctgaaaggtgtagctttatattttatggcattc

SEQ ID NO: 1031 - DNA, 457 bp, Homo sapiens
  misc_feature 416: n = A,T,C or G
acattcatttgccaaaaaaaaaaaaaaaaagaaaaaaaaggcttaaaggcaaagaaggtgaatcaacgtgcaaattagcatctggcccaattgcaaaattcatttcctggatgtgagggattgaaccatgcacacttgcaagcaagatgaagggcaaacagatgacatcaaatcaaaattaaccccacaaagaatccagaagacctcagatggtaaaggacagaggtctacgtctactgctgttagtgctcaggtatccatcctgttttccctaatctcctgattctgatccaagagtctttgagacctatgccctaggccatcctttcatctagaaatggaaaccatggctgtggcaccaggcatggtcaaccctgcagtgattcagctgcacaaaggggtagtccagagcttanatagctgtctgatgtggctaggacacaactgtcattttatg

SEQ ID NO: 1032 - DNA, 495 bp, Homo sapiens
accaaatcttgccctcaaattaatttttaaacatttaaatctgtatttcaaagctagctcatcatgtatactaaattgcctttaaaaattaacctaaattgtaattttttagtttcttccaaagcatttcttcctaattttgattgagtaattaaacatgagcctcatagtcttatcagtaatacatctatgtggtcttcaacaatgcaggctaattagggaaccaatactctttataccaacagaattcatgttaatcaccccagtgattaattagagggaccaagtattaaatcaaaactaaaaccaaatttctcttgaatagaagaaagtcttcttggttacaagttggcatccaactagggaagatactttgttgacaagtcaccatacatagattgttttccaaggcatatgattcctaaaggtctgtagtatcttcatttaaagcagtgcccttgattaccattattatgtataaagtgttctgaaagt

SEQ ID NO: 1033 - DNA, 225 bp, Homo sapiens
acaacctcatggaaattctcactataagatttagaggcaatgttccctagctataagccagggcaagaaatggcgcctctggagttggggaacattaggggaacattacaaccgggtagatgctggttccctgaagtgtggggccatgaacatgcagggacccacggtttgaatgaaacagctactgaaagctaagttcaaaccacccttgcgtaacaaaggagt

SEQ ID NO: 1034 - DNA, 249 bp, Homo sapiens
accattattatagattcagaaaggctttgcatattcacattttggcagtttaatacttgtggaaaagatcaatgcaagctctaccacagtgataggtatttaaacaacaatggcaaatatttcaaaactaaggggatccaggcaggcactaatgtttctaaagcaactgaaacatttccaaagcatttatttgtttttcaggttagttttatgagccaatatagacattactacatgtccacaggaagt

SEQ ID NO: 1035 - DNA, 185 bp, Homo sapiens
agtgactgaattcctccagcaaaagctgaagcagtcccagctgctggctttgaagaaagagctgatggtgcagaagcagcaggaggcacttgaggagcaggcggctctggagcctaagctggacctgctactggagaagaccaaggagctgcagaagctgattgaagctgacatctccaagaggt

SEQ ID NO: 1036 - DNA, 408 bp, Homo sapiens
  misc_feature 348, 398: n = A,T,C or G
accttgcctccagtccagcttcctcctccaccacccagtcctgagatactgatgcagcagttcttaggaagaccccttgtgaaagaacctttctttagacccatacttactgttcctcaaatgcctgcagtttgcccgggagtcgtctctgcaactggccaacctagagcccccctgatgactggcatagcctgggctctgccagcgcctgtgggagacgctgtgcctcccagtgcaggtctgcggagtgatccctccatcatgaattgggagagaattacagacaggctgaaaactgcctttccacagcaaaccagaaaggaacttacagatttcttacggaaattnaaggatgcttatggaaaatccttgtctgaactgacatttgatgaaattgnttgcaagatt

SEQ ID NO: 1037 - DNA, 298 bp, Homo sapiens
accaagcaccaccgttggtggttccatctacaaagctgctgtcatcatcattcttgcgacatggtggccgattggggtcagacatggccgggttgaaagaagagtatgcccgggccaagctttggaaaatggcgtcatctggggaggagctgtattcgtgagcactaccactccgcgtctcatcatatggataattggccacaaggtctcctccatggagattggcagaaagcacaaaaggaatatccataatccaatgaatgacagccttggtctcaggagcaagctttgtgttttg

SEQ ID NO: 1038 - DNA, 470 bp, Homo sapiens
  misc_feature 427, 454: n = A,T,C or G
acttggcccgggtcacgcgtgggtcctctccgggctcgggagtagcatcctcaggagtagtgtagcgagcaaattctggaaagtagtcctcaatcttcgatttcccagcaaggactttctcagcgagcagatcttgcttgttgaggaacaggatcacagagatggtgcgcagccatctgttgttccagatgctcttgaagaggttcagagcctcctgcaggcggttggtctggttgtcctcccggatgaccatgttgtagctgctgctggccaccacgaagatgatggcagtcacatcgttgaagcactggatccacttgcggcgttcatcgcgctggccacccacgtcaaacatgtggaagttgactttgtccacctggaacttggtctcaaagattccagaagtcaggacacggcagcgaagcangtcctgatcgctcggcacatagtcagnctgcttgatcacgtcg

SEQ ID NO: 1039 - DNA, 263 bp, Homo sapiens
cttaaatgcaatattcctggtattatttacaatgcagaattttttgagtaattctagctttcaaaaattagtgaagttcttttactgtaattggtgacaatgtcacataatgaatgctattgaaaaggttaacagatacagctcggagttgtgagcactctactgcaagacttaaatagttcagtataaattgtcgtttttttcttgtgctgactaactataagcatgatcttgttaatgcatttttgatgggaagaaaaggt

SEQ ID NO: 1040 - DNA, 449 bp, Homo sapiens
  misc_feature 415: n = A,T,C or G
acatggggctaccccttccacgacggggattatctcaatgatgaggccttatggaacaagtgccgagagcctctcaatgtggttccctggaatctgaccctcttctccatcctgctggtcgtaggaggaatccagatggttctctgcgccatccaggtggtcaatggcctcctggggaccctctgtggggactgccagtgttgtggctgctgtgggggagatggacccgtttaaacctccgagatgagctgctcagactctacagcatgacgactacaatttcttttcataaaacttcttctcttcttggaattattaattcctatctgcttcctagctgataaagcttagaaaaggcagttattccttctttccaccagctttgctcgagttagaattttgttattttcaaatnaaaaatagtttggccacttaacaaatttgattta

SEQ ID NO: 1041 - DNA, 292 bp, Homo sapiens
accccaaggagtagatgccagggtcctaagttgaaaatgatgtcgattgggggcgggggacactgtatttgatatttgtgatcagtgatcattgttcaactgcgaaatagagtgtttgcttttgataatggaaaattgtattcgttttaaaattccgtttgttgagaataacaatatgtttaaaaatataattgaacaaatttttttctttgtttcctgtcattgacatttagtataacagttttgctaacgttctaaaatgaagtcgttccatcataatctatgatcttgt

SEQ ID NO: 1042 - DNA, 427 bp, Homo sapiens
gcccggctaatttttgtatttttagtagagatggagtttcaccatgttagccaggatggtctcgatctcccgacctcgtgatccacccgtctcggcctcccaaagtgctgggatcacaggcatgactaccacgcccagcctccaaatcttttaataaaaaaaaaaataataaaaataaaataaaaacctaactatatctatttatggactaaaactgccaagaagtaaaaggacaatgcaggaatctctattcttagaaaatttcactaactagagagaaaggacttggctaaaaatggagaaaggttagcttaaaaacccatgctgtgcttgggttttcagactactaaatccagaatacaattttctgagtgtgaggaaaagaccaacattaattccacatttaagtgactcaatggatttaagt

SEQ ID NO: 1043 - DNA, 518 bp, Homo sapiens
  misc_feature 106, 107, 275, 351: n = A,T,C or G
acttgctaaagaagaatgaagtgttcagcatttcccaaactcatctgaccacagaatcccctttttcccccaaaaaaatatctagaggagctaatagctcttagannattctttggaaaatgctattctagcctgattctaaacattccagagctaaatctggcaatagttatgtttttaatttctgaagaagaatcatttttcttataaggtcaactaccatgataacctcttggtttccactccataagtaggcttcccaaagcaactaacanctaaattttcttcactacatactaaggaattcaaagaacttattcttgcgtgaatgagaattatgttctttttaangagatacttatattcttcccctaagcattaaaaatacaaagatctaattctagatcctaggacctagaatcacaattattttaaggaaatgagagtattttattacaacatcattgcaattaatattatcaatgaatgataattagtagtggtgctacagtagtagt

SEQ ID NO: 1044 - DNA, 367 bp, Homo sapiens
gtctgtcccccatttttcagatgaggataaggatccagagtaaagagaagatgctagacgaaaacccacattacctgttaggcctcagcatggcttatgtgcacgtgtaaatggagtccctgtgaatgacagcatgtttcttacatagataattatggatacaaagcagctgtatgtagatagtgtattgtcttcacaccgatgattctgctttttgctaaattagaataagagcttttttgtttcttgggtttttaaaatgtgaatctgcaatgatcataaaaattaaaatgtgaatgtcaacaataaaaagcaagactatgaaaggctcagatttcttgcagtttaaaatggtgtctgaggttgt

SEQ ID NO: 1045 - DNA, 421 bp, Homo sapiens
actcctaaaatgaccattattagggaccagaaaattatatcttggctaagtaatagaggaccattttggtttttgtaaattaatggttctcatgacttgtgtggcatctaaaaataatgtttttatagcatctctctgccactaaattgttgacttgaattttgggaaaaaaaaagttggtgttgatatgtatatgtgtgtgtgtatatatgtatttataaacaagtgtgtttgagtaacaagtgagtttcatagtcttcccctacgcatgtgtattccacacacaaatggctgagttatagtcataaaacaatttgcaataaaaaaaaaaaccaaaacagattgtcagttaaccaggaaacagttaatgttttttaatgaatctggcattatagtgagcaaatgtcgtattaatttaggc

SEQ ID NO: 1046 - DNA, 377 bp, Homo sapiens
accctgcttgtctattttcctgactcagctcttgcctgcctttttcacatgttgctgcaattagactcaccgtgaggactacagtcaatttcagtctatcttgtgcccaatacaacaaggatttttaatagtaacaacccacacctcacccactaggactcaatgttcacaacaggaaggaccattgctgcatactccttgaccagcaacttttttgaagatatttttaagtgcagagtaggcctctattcctgtatgtaattgttcattttcagcacctggaacctcatctatcgggtctggaaggaatacagcagttcgaaagccgcgtccatttctctccttcagtagtgcagaaatgagtccgattcaccagt

SEQ ID NO: 1047 - DNA, 418 bp, Homo sapiens
gggggaaggggtggctgtgggtgcagcttcggcagacttaaacgttcctgcctgctggctctgaagagagcagtggctctaccagcacagcgcttgagctctgctaagggatagactgcctcctcaagtgggtccctgatccccaggcctcctgatgggaagatacctcccaacaggggccaacagacacctcatacgggagagctccggctagcaactggcaggtgcccctctcagatgaagcttccagaggaaggagcaggcagtaatctttgctgttttgcagcctccactggtgatacccaggcaaacagggtctggagtggaactccagtgaactccagtgaactccagcaaactccagcagacctggagaagaggagcctgactgttagaaagaaactcccaagcaggaagc

SEQ ID NO: 1048 - DNA, 413 bp, Homo sapiens
accttaatggtttcggtctgttatatacctataaaatagacaagtatatgtttgtccctttgtaggtaactgctatgatgattgctatatagtgaaactgacatgagtttaaaactagatggagcagcttttattgctggcaggaaaaagcatggtgtaatattaaggactggggcccaggtctagactccaggactccataaaagagtttaagttcaagcccttccattaatgaactgtgtaagcataggcagttacaaaaggacccatctctaaaatgggaataataatactttacctccctcacagtattgttgtgagggaaacaatagcataactgcaaaagtgctttgaacagtaaaaagatatacaagtaaaaggcattatttatatgagtaagaaagacatttttg

SEQ ID NO: 1049 - DNA, 202 bp, Homo sapiens
acttgaaggagaacctgtgtcctctacttttctgatctcccacaagtattttgtgtttgtttcctgagtcctgaggttattattttactcctgttttgcccccagttttctttgtttttttttctggagacccagggaggcccatggtggagatcatttgtaaggaatggatcatggtctgggtttccaaaactaccctagt

SEQ ID NO: 1050 - DNA, 444 bp, Homo sapiens
accactcagtgctaccatccccacccctacaccacttccacacaggggcctcatggcatggtcagggtcccagctgtgggtgagagcagggcactgtccagctgtccactggggaagtcaagatgtcctaaggcccaggccagggcatctggagtctgaaggaccctagttcctagaggcatctggcagcaagaaggtgaggcatcagggaacgggaatcaggctgggactgatcagaggtgaagggacagagagaggagaggaggaagattgagctgggggcaacagccaagctcacctgggcaggtctctgccacctccttgctctgtgagctgtcagtctaggttattctctttttttgtggctatttttaattgctttggatttgttaaatgttttctgtcttctgttaagtgtgttttctctggagatagaatgtaaac

SEQ ID NO: 1051 - DNA, 516 bp, Homo sapiens
  misc_feature 496: n = A,T,C or G
acagaaaatacctctgaggttgacttgttaaataactgatgaatgttatttcacactgaatctcaaagcagtcatttgttttgcgggttaggggaaagttttgttttttgctggtgttttttgttgtttttaattaggcacactaagagtggctaaatttgggggaattggtggataggaaagaccttgaaaagtgatgtgtagatgaaaacacaaggtatggatgttggttacagagttcagttttaacaagggaaatttggggatttttttttttttacttgcatgttctatgggtagctatcaaagggtgtaacaaattattccagcttttcccaatactaattatattggttttaaaaagtctgcataatcactaggtggcattttcccttcatttgtgaaccaagaggggtaaatgatgctacccatacagtgacttctgagttctttaactttgacagaatctccattgtttcattgaatttctcattgnattatatgtctttccaagtg

SEQ ID NO: 1052 - DNA, 314 bp, Homo sapiens
  misc_feature 62, 99, 211: n = A,T,C or G
acaagcttttttttttttttttttttttttttttttcttttttagggaggaatttgaagtanatagaaaccgacctggattactccggtctgaactcanatcacgtaggactttaatcgttgaacaaacgaacctttaatagcggctgcaccatcgggatgtcctgatccaacatcgaggtcgtaaaccctattgttgatatggactctanaataggattgcgctgttatccctagggtaacttgttccgttggtcaagttattggatcaattgagtatagtagttcgctttgactggtgaagtcttagcatgt

SEQ ID NO: 1053 - DNA, 380 bp, Homo sapiens
  misc_feature 37, 51, 126, 141: n = A,T,C or G
caagctttttttttttttttttttttttttttttganatggggtcttgctntgttgcccaggctggagtgcaatggtgtgatctcagctcactgcaacctccacctcctgggtccaagtgattctntgcctcagcctccanagtagctgggattacaggtgcccgccaccacacctagctaatttttgtattttttaaaatagagacaagatttcaccttgttggtcaggctggtcttgaactcctgacctcaggtgatccacccacttcagcctcccaaagtgctggaattacaggggtgagccaccatgctcggccaaaagtaatattttaagaaatctttcacggaaaaaaaactctgcattacaaaatgtgacctg

SEQ ID NO: 1054 - DNA, 134 bp, Homo sapiens
ttcctggtttgagtaagttaatgtcctggatatttcttgtggcagggggtggtcaaagagcctgattgctgacccagtctcaggcctgtggtcgatgacctctcggtagtttcaaagggggctggagggggata

SEQ ID NO: 1055 - DNA, 341 bp, Homo sapiens
tgaaatcattgcgctgtgatttcatctgtgatgtgaaaaatcaatttattatccttggtgctttcccccccaccaatgcacaaataattgtgaacagcttgaaatgacttaaactgtaatccaaatgggacaatctgataagaatttcatgcattggtagttaaataacttaaattgctaaagctttagcttgaaatttatgtttagaaaaactattgatttcccatggtatgaatataactattgtaattcttcaaatgagactcttctcaccttaaatagtcatatattaattaacttataggaaataagcatactatatgttagctgttttaaaaggt

SEQ ID NO: 1056 - DNA, 186 bp, Homo sapiens
acttggcccgggtcacgcgtgggtcctctccgggctcgggagtagcatcctcaggagtagtgtagcgagcaaattctggaaagtagtcctcaatcttcgatttcccagcaaggactttctcagcgagcagatcttgcttgttgaggaacaggatcacagagatggtgcgcagccatctgttgttcc

SEQ ID NO: 1057 - DNA, 432 bp, Homo sapiens
  misc_feature 267: n = A,T,C or G
ttttttgaaaagtcatggaggccatggggttggcttgaaaccagctttggggggttcgattccttccttttttgtctagattttatgtatacgggttcttcgaatgtgtggtagggtggggggcatccatatagtcactccaggtttatggagggttcttctactattaggacttttcgcttcgaagcgaaggcttctcaaatcatgaaaattattaatattactgctgttagagaaatgaatgagcctacagatgataggatgttncatgtggtgtatgcatcggggtagtccgagtaacgtcggggcattccggataggccgagaaagtgttgtgggaagaaagttagatttacgccgatgaatatgatagtgaaatggatttggcgtaggtttggtctagggtgtagcctgagaataggggaaatcagt

SEQ ID NO: 1058 - DNA, 453 bp, Homo sapiens
acccccagcgatggagtgacacagcacgaagccctgtgtgtatacaggaataaacagactcagtttctcctgccacactctcacaacacaattctgataccagatgggtggggtcttaccacacacatcaggtaagcagtcaattctacagtagatgccagctgggtatccactaattcacttcaattctggactacctacagactgtccctgacttaggatggtttaatttaagatgttttggctttatgatgggtttatcaggacataatcccatcttaaatcaagaagcatctgaattacaatggttcaatttacaatttttcaacttcatgatgggcttattgggttataacctgatgcatttctacttacggtatttcaatttttttttttttgagacggagtcttgctctgtcacccaagctgtagtgcaatggcccgatcttggct

SEQ ID NO: 1059 - DNA, 285 bp, Homo sapiens; identical to SEQ ID NO: 1029

SEQ ID NO: 1060 - DNA, 388 bp, Homo sapiens
acagattcaaagttctctgaatttactcatcaagtataaaataaagcctcttaaaatatcccatgctgctattattttaccagcttatactgataaactatttacagtttacaaagcgttttatctaaattctctgcttttcacaaaaaccctgatcaggtagggcaagtataattatcaccacctctaacagatggagaaattaggtctcaaagctatttaaacggcttgcctacagtcattcagctggtaaaaacctaagctgaaaataaaatctaggtcttttgactcctagccaaatattctatcctgggacacttagcccaaaacaaacctccgttctggttccagtcatgggcatcaccaagttgattaacattatacctgt

SEQ ID NO: 1061 - DNA, 426 bp, Homo sapiens
tgaccatccatatccaatgttctcatttaaacattacccagcatcattgtttataatcagaaactctggtccttctgtctggtggcacttagagtcttttgtgccataatgcagcagtatggagggaggattttatggagaaatggggatagtcttcatgaccacaaataaataaaggaaaactaagctgtattgtgggttttgaaaaggttattatacttcttaacaattcttttttttcagggacttttctagctgtatgactgttacttgaccttctttgaaaagcattcccaaaatgctctattttagatagattaacattaaccaacataattttttttagatcgagtcggcataaatttctaagtcagcctctagtcgtggttcatctctttcacctgcattttatttggtgtttgtctg

SEQ ID NO: 1062 - DNA, 481 bp, Homo sapiens
  misc_feature 405: n = A,T,C or G
actttttttgtaaattgctttgttttgtttaatcagatactgtggaataaaagcaccttttgcttttctcactaaccacacactcttgcagagctttcaggtgttactcagctgcatagttacgcagatgtaatgcacattattggcgtatctttaagttggattcaaatggccatttttctccaattttggtaaattggatatcttttttttacaaatacgaccattaacctcagttaaatttttgtttgttttcctgtttgatgctgtctatttgcattgagtgtaagtcatttgaactaatggtataactcctaaagctttctctgctccagttatttttattaaatatttttcacttggcttatttttaaaactgggaacataaagtgcctgtatcttgtnaaacttcatttgtttcttttggttcagagaagttcatttatgttcaaagacgtttattcatgttcaacaggaagac

SEQ ID NO: 1063 - DNA, 398 bp, Homo sapiens
accttggctacaggaaaatgttcttgggagatgctgttgatgtgtttgaaacaaggcgagcagaagccaagaagtggcagaacacacccagagttgctactggacccactcctttcagcaccatgccaaacgcagcagccgttaccatggctgcaacacttacacagcagcaacagcctgctacagggccacagccatctctgggagttagttttggaacgccattcggctcaggtattggcactggcttgcaatcaagtggcttaggttcttcaaaccttggaggatttggaactagctctggttttggatgcagcaccacaggggcctccacatttggatttggaacaacaaataaaccctcaggaagtcttagtgcaggctttggcagctcaagt

SEQ ID NO: 1064 - DNA, 419 bp, Homo sapiens
actttatttgctgtttgtaattccaaaaaggatatgcaaaccagtctgtctatttcatggatatttaatagtgagatcttccatgttgaaggtaatgtatttttttttaagattttaaaattgctattttgttacaaaatagagacctattaacagtttgagagctccttatgtgccctcagggaaagaaccctctgtgcaacagaactacacaaaacatcttcagcacgttctgagggtgaatatatactacataaattgatcttgtgtatttaaccttatctttttaattttaaaattgaaattttgaaacttggttgtgctctgctggagggggttgggataaactgcttagatgtttgcctacttgtccagtgaaattacatttgcatcagtatatgtatatacctgccaacctt

SEQ ID NO: 1065 - DNA, 166 bp, Homo sapiens
  misc_feature 159: n = A,T,C or G
actttggttataccatgataatggttttgatcttctttctttttacaggaacaattggcttctttgcatgcttttggtttgttaccaaaatatacagtgtggtgaaggttgactgaagaagtccagtgtgtccagttaaaacagaaataaattaaactnttcatca

SEQ ID NO: 1066 - DNA, 407 bp, Homo sapiens
caaccaggcagtgaccagaatcacttctgtcaacccactgatgtggctgtggatccaggcactggagccatttatgtatcagatggttactgcaacagcaggattgtgcagttttcaccaagtggaaagttcatcacacagtggggagaagagtcttcagggagcagtcctctgccaggccagttcactgttcctcacagcttggctcttgtgcctcttttgggccaattatgtgtggcagaccgggaaaatggtcggatccagtgttttaaaactgacaccaaagaatttgtgagagagattaagcattcatcatttggaagaaatgtatttgcaatttcatatataccaggcttgctctttgcagtgaatgggaagcctcattttggggaccaagacctgtcctg

SEQ ID NO: 1067 - DNA, 301 bp, Homo sapiens
acagaatatatcacaatgctggttacaaacatacttagtatggtttaatagttacaaataacggtgggcactacaagttggtgagaatgatatgaaaggtcatcctgacacaatgaagaaccgtcttcaaaaatctatttaatgaccttagatatttctatagaaattattgtggcactattagtggggattttcacgtaaagattgttagtgttttgtttttaactgttccattaagaactttttattttgagcctattaaactaaaatcccctgttgcttaataaagtataaaaatagt

SEQ ID NO: 1068 - DNA, 403 bp, Homo sapiens
actgaacaggtaggagggtgggagggcagtcaagagttgtgtttgcctgccactttcttttcataaactttactcttttgagaatttgcgaaggcaggaacagagccttggcccaggtaagtatggtttttcttgtcaagtgaccaaccaaccaattctagccacacgaatagttaggaaaatgccaaagtgggaattgttaacctcatcaaaggagatgggacctgcaacacaagcacctttgggtcagtgtgttaattagggctgagagcctgggtgaaaggcaagaagaggggcaaaagaggctgaggtggtaattcctcttgtcagtgtcatgggagaaaagaaacaaggaacgtttactgtctaactgagctgggcagagggcatggaaactatgaag

SEQ ID NO: 1069 - DNA, 408 bp, Homo sapiens
acacataatcatatttaagttttttgcataaaataaatgcttctagatgtcatggcagtctttttaatctttttatcatatgctttcttgtgaattttttcatgttaaagagctaaagtcataacatgattacagtcaactctccattatctatataaaatagtgactaagcctcaggtttttaattttgtgataacaaaataacgaaggcatgtaagacctgattctggaggaacatgaaatttgtcttttctcatgtccagagttctatcctgcccccactgtccactgtagggtcatccgcaaagccctagcagaatgtgctcactccatttccttacacgtttctagcatgggtcagaggaaacaacatttgtgttataacttcgtcttgataggctgtagtgt

SEQ ID NO: 1070 - DNA, 385 bp, Homo sapiens
actacttgataatttagacttttctgaggtttctttcttcccaatatagtcttttagaaagtctcataggaccttttattagagtctaattaaatcaaactttgtcagaaggtagttttatcagctgtccagcaacagtattaaatggcacatgatttaagttctattgaagattgtttctgtccaatatgattatgtttgatggcatcatagcacctctttatagaactctaagtcactcaaactttgaacaggtaatatctgacacatgtaaagatgccaattttaattaccttcttagggaggttttaatcttgttctaaaaattttgctcctgtttcttattgctgtatttgtttccagtcccacagcctcctaattgtct

SEQ ID NO: 1071 - DNA, 515 bp, Homo sapiens
  misc_feature 483: n = A,T,C or G
actaaagtcttcccttttggaggaaatatgtatgtcccaattacacacaatgtcaaacactccctactatcctcctagtagcgtcagttgccctttaccatcccatttgcacccttgtttatattttaaagaaatcgctcttctaatgtctctatcaaaaatgattgaacaaaagatcacccccctcacacacacaagacagtgtttcaagaaaagaagaaaacaccagaaccatcttatacatttatggcatctggatcctacaggcatttgcaattgcagtccttgaaacaaagagagagaagtccaacagtcagttgttaatggatactttataagctaagctataagaaacaagcaaagtaaaagcagcaaaacagggtaatcatcatattaatggcagaaaacaaaagtgaagatccacaaactgttgctgtgggtatataaatatcttaactaaactgggatacaacaggcctagtnaatttgtcttctcaggaattggaatcgagcta

SEQ ID NO: 1072 - DNA, 410 bp, Homo sapiens
accaatttggatgaattcttgatagatttaaatagtgtatgtaattttgtaatgcttagactcttgaagagctactttctgttttaatgttaagattcttgtgtcttagttttttttaacatggatgtaattccatgtaaacaggtatggaagtaggaaatgtttaggctggacttggtggattattaattgactttcttgggttcttgggagtcaacattactaaagcagtgtgaatccctgtttgcttcagggcgagatgtgtgacagaggtggcatcaagctcttacagtcccaaccctccaacggaaatgggcgaagatctcaggaatggcatcggtcacaggaaatcgatagtggctggctgctagcatggccacttggggcttaggcagaaatagagccatggt

SEQ ID NO: 1073 - DNA, 365 bp, Homo sapiens; identical to SEQ ID NO: 877

SEQ ID NO: 1074 - DNA, 485 bp, Homo sapiens
acctggagggatgcaagacttcaattaccttagcagcaactgttttgagatcaccgtggagcttagctgtgagaagttcccacctgaagagactctgaagacctactgggaggataacaaaaactccctcattagctaccttgagcagatacaccgaggagttaaaggatttgtccgagaccttcaaggtaacccaattgcgaatgccaccatctccgtggaaggaatagaccacgatgttacatccgcaaaggatggtgattactggagattgcttatacctggaaactataaacttacagcctcagctccaggctatctggcaataacaaagaaagtggcagttccttacagccctgctgctggggttgattttgaactggagtcattttctgaaaggaaagaagaggagaaggaagaattgatggaatggtggaaaatgatgtcagaaactttaaatttttaaaaggcttctagttagctgc

SEQ ID NO: 1075 - DNA, 334 bp, Homo sapiens
accaacagtagaagtaacaggaaagcctggcagagttaaatatcttggacatttattggtaaagcttatttataaactgcagtcagagctagttaatttccttaaatctttttgtattcagatagataatatgaatcattatgggttgattcagaaataaaatttgtgaggtgattttgaatcttgtctatataggaaaatgaagcacagaattactcagtcttccatatcgtatttgacttcatatcaatctagtaaaaaaggagttgcaatagccaagtatagagagaatagtgaaaaattaatcttgccctttcaagccttatacagtagt

SEQ ID NO: 1076 - DNA, 498 bp, Homo sapiens
  misc_feature 439, 488: n = A,T,C or G
aaaactatgatgtttagttgctttattttacctctatgtgattatttttcttaattgttattttttataatcattatttttctgaaccattcttctggcctcagaagtaggactgaattctactattgctaggtgtgagaaagtggtggtgagaaccttagagcagtggagatttgctacctggtctgtgttttgagaagtgccccttagaaagttaaaagaatgtagaaaagatactcagtcttaatcctatgcaaaaaaaaaaaatcaagtaattgttttcctatgaggaaaataaccatgagctgtatcatgctacttagcttttatgtaaatatttcttatgtctcctctattaagagtatttaaaatcatatttaaatatgaatctattcatgctaacattatttttcaaaacatacatggaaatttagcccanattgtctacatataaggtttttatttgaattgtaaaatatttaaaagtntgaataaaat

SEQ ID NO: 1077 - DNA, 495 bp, Homo sapiens
acagaattatatatagatatagctacacgtataaagcttcattataggcctctgatacaattataataacggttccctgaaccttttagagtgcaattaagaacaaaaactaaattttgtttacatgaatatggaataaatacaataatcaaaatatgactctccctaaaagtgaaacacacaagccaatccggaactgctgtgcgaaagataaaatcgagaaaggcaaggtttcggtaggaggacgcgatgaggggcccgccccaggcagggaatggcaatgctctaaagaaaagagacttcgtcaacagggaggagtcagcccttgacagcgaccttgttctctgcagcagcaaacatggcatagaatcgggaactgtcgttggacagaaggaccgatggggtgtcaaactccaccacctgtccctgggccagcaccataatcctatcggagcctagaaccgtgtgcaggcgatgggcaatggtcagcatggt

SEQ ID NO: 1078 - DNA, 525 bp, Homo sapiens
  misc_feature 413: n = A,T,C or G
actgtggctgggaatgtaaggtatactgagaataaaggagctctcagtgaaggcaatgtccctcagaaaagcatggcgacccagagttgatgtgggtgtgaacggtcagatggtccccggttgggaaggggtgtgtgtgtgttttctgggtcggggtagtagcgagcagagaggaaaagggagatttgtaagctttgttcagcaaatctgtcacatcgaaaacaaaaataatcaagcccaggatctgaaaacattcctttcttttgtagatcatataaatttgtgttggctgaatattgaatttttttgtattatttttctcattagagacaccaagcattaggattccaggcatagtaaataatctccaatgaaaatatgacccattgggaaacataaaatcattgcagatnactcccatgagtcagtcccaggaaggtcctcatggttctctggcagttatgaaatgctaagccacccaggacactaagatctgacttgtccttttcttagttgggagatttc

SEQ ID NO: 1079 - DNA, 380 bp, Homo sapiens
acctgttgacaacctagaaaagatgagacattctaaggtgccctaacaatcttcagtctctaacagctgaacaggaaggccatttcactcaactgtgatgcgatcatcactgactggcatttagaattagatttcaagactccactcctgtgggggccactaaataactgaatacattttaagagcaatctacactgagggaaataacgattctaaggtattctgcaaagaaagagtatcgataatgggaactggcaactgagcatgctaaatcaaattccatgaatacagttttcataagatgtctttactacatgcattttgctaatatttccctaaaatattcaccaactctacagagttatactttgtgttaaggt

SEQ ID NO: 1080 - DNA, 414 bp, Homo sapiens
actttgcacatgtggaatttcatacctaaatttgatactattttggtttatttatggctacttacaagagtcacagtaataatgtccactcatcagagtctttctttggtagagcctaatgggaccagacagatgaactgttatgcaaatgagatggataaagcaaattcatgatagtatgaattataagggtttttgtttaatggaaatacaacttaaaaaggatttccatatttatccccatcattattttggaagcttaataccctgttcaggggttgaagagtttgaatagctcacacaatcctgtaaaaatgacaactggctgccctttaataaataaagtcattgtaaagaattacatttacagagtgaaaagtgaatacatagcatttcaaattcaattttggaagt

SEQ ID NO: 1081 - DNA, 520 bp, Homo sapiens
acgaaacacatttcaaagctctctgaagggcttccttgaagttcctttcactggtttcaaagtagaaggtagtaactcctttgtccaagaaggctgaattgagcacttaacaattctccaaagaaatttcttcattggtctctatcctagaccccttctgtatccttgatatggctgaggattctaaaaaatgaccagtcttacatgggagggctgggatataaaaaataaaataataaataatgataaaaactgaaaactgaccacgttcttggatatgttttctttgggttgtgtgtgtgtgtgagacttttgatagttacccaaagtaggaaaaatcccattctaataaggttatatttatgtagctctgcaaataaacatctagcaaatgtaaaaagtattttctttgccttaaaaatgattaaaattatttgaactcctgaggagtgttatatgaataaaattagtaagttatttggaggaaagttattttttaaaaagacaactggtaaacagt

SEQ ID NO: 1082 - DNA, 404 bp, Homo sapiens
gttagttgctcccagcaggatcagacccagctctttaacttcatggttttacagcttgttttttctttttcttttcttttcttttttttttttaaaaaagcacctttttttgttgtttccccttaataaaagaggtgcttttttaatcaggattgcatttgtgctgggtaaaagaggagagctgtgctttctaccccaaagttgttggtaatggagccggtctgcccttcctacaaactcaagaggctcattgttcaaggtgtaacaacatttaattgcatgtcctctaacgctttgaaacctttagagggaagatcctcattttttacaattttgttccttttcatcatagaaaacatgtttaagataaaatacaaactttacctaccccaaattcataaagt

SEQ ID NO: 1083 - DNA, 318 bp, Homo sapiens
actctagtataatatcacttcacgacaaaagatgtgaattggaaaaacagtttagatcacaagaaccataaaatgtcaccaggctcacacaatcatttaagaaataaaaacacatacacaaaaatgtaggctgcccctacaatctaatttatgataaaataagatgaatttcagcctaagaatacttcatttattttcttagttgtgaaaaaattagttaagaaccttaaaaagaactttttactctaaccagatcttttaatttcctagaacatactctaatatactagttttcctaagcttgaaacaaatcacagt

SEQ ID NO: 1084 - DNA, 267 bp, Homo sapiens
actccacaaaacactacagacagtaacaaaataattcaataaatattaaaaactttcaatagaattataggacacttttttatcatatgtgagcatcaacaatgccacagccattagatatactattaaacacagtcatagatatctttcttgaataatggacataataaattttttatcaaggagtcataacatttacacatatccatacacaagataacagctcagaggaaatgaagcagactccccagtgacctggtttcatct

SEQ ID NO: 1085 - DNA, 534 bp, Homo sapiens
  misc_feature 528: n = A,T,C or G
acttcttccactcaagaaggcaagtcaaatggaaaaaccaaagccctcaattcaaatgcagcatcaaatgcaacaaatgaaacatactatgaagctgatgatataattcaagaaaaaacaatggatgcaacacaaatccacattgcttattaactaaaaattctgtgttttaaatgcttactggagagatgggacaataaaaataaagcgtgcacttgaaacggtttgtaatattgcttttcaaaaattcgtcactcacaaagcaagacacagctgcatttttgatcattcagttactttattaaacgcacattaaggttttattggttttcctttgtataaatttatttgctaattaagatgtttctgtatcacatgagattatgctaattattcaggagaaattaaataatttatcaataacaagataagcagtcctatctcagtgaagaacagtgagaagtttatgtcacattaccagcatttctcaactttctgatacttacaggcagttattcttatgagatngtacct

SEQ ID NO: 1086 - DNA, 522 bp, Homo sapiens
acaataataattatgagtttgcttatgtaatctcacctcacctggatgatcactaataccaattcatttattactaaccttctggcttccttctctcaatatgcttacaaagtctccagtcacctacaatgctggctttctcccactgagtttgctgtttgcaatttttccatgaagtttgaacttcataaggtaattcatggcattgaactggttcatgaaaagaacactagagtctgtcatttgctttggcttgaagtatggttggtaacacaaattttcacctgctcttctaccatttgaatttgtgtagagggtgtttgcagagcaatgcccgtaatgcttagagaatgttctcctaaaagacttgcggaatcactctgtccttggaagtttcatatattgtttgatatgaagtgttagatagaatttccaatattggagcatatcaaaaagtattaaaactaaaaaggaccagagaattcttagattggcccggaaaggccaataaagagttagaat

SEQ ID NO: 1087 - DNA, 458 bp, Homo sapiens
  misc_feature 104, 254, 360, 386, 403, 411, 441: n = A,T,C or G
acaaaggtcaagccaattttatgaaacagtcctacagagtaatatatgtgatgcagtgtaagaaggaaaatactcatctctaacattatggtaataacatttancctcttaggagttggagcagggggatgggtaattacagatttgcagactatagaaagagtttcatttttttgtgaccccacagagtctcaaatttttatttcactacctgctagagcctactgtgaaatcactgctccatatttgccagnggaggaaatgggcatagagtagagaatagcttcatatgtttacacgtttgcatagactacacacatgtcatgcgtttatggcaggtagctggtatttattccccanagtaataatgttgaagtatgggtctnatcattcccatacacanaaacacanaacactttgatcataaacttttttcttcanaagccaaactaacttgc

SEQ ID NO: 1088 - DNA, 533 bp, Homo sapiens
acacattacttctgaaaatacactggcaagccacttctagttgcagggtagacttggaaaatgaagtctaactgggtgaccctgtgcctccacattattctggaggaaggggatcacggagctagggtccccagtctgggaggctggtagagaggcagctcgctgtgctactctgatatttttagctccgtgggggaaaaagaactgctagacagagctctgtcaacacagatctgacaatctcattcagaaacaagttacagagacctcaagtgattaataaacaagattattctatagaacatcttatggtgacataatcaatatgatttcaacactcagctaataaatgctatgaaatacaatttatgtaaggtgttaattgacatgtcaggttttaaatacaaaaggaatgagggagggagacatgaatatagatgggtgttatcagagaatgacacttagatacatttcatattgtgtcatgtaaactaatacctactttttgggatatttcttcatggtttagtttt

SEQ ID NO: 1089 - DNA, 413 bp, Homo sapiens
acctcgttgatgaactaaaccagtataaagggcgaggaacaaatttgataaaaacaggaaacttagagctggtttcttccatgttttcaggtgggttaatgagtatcctatatgaagatagacatattgaaccttaacactgacaatcttttgttatgttaactgcaaatacatctgtaatttttaatggaaatagcaaaaactgtaatactgttatagacaaataagaaataagcaataagtcatatctctgaccattcaccattcactactgtcatctaggtcttgactttttctagtaaaaggtattgaggtatagtggaaagatgatggttatggagtccaacaggtccagatttgaattccagttctagcacaagtcgttttactttgctggtcattgggataatagt

SEQ ID NO: 1090 - DNA, 163 bp, Homo sapiens
ggaagaggaggtccctgttttacaggatagcctatttcagtcttagggagttctaatggttaacttctgttttcatacactgaatttaactttgttttcctgtgatttattaatacagtctatagctttcttagagttgagaagaaaatgattaattgatcaa

SEQ ID NO: 1091 - DNA, 270 bp, Homo sapiens
acatcaatttcaaaaagtattggtcatttaaacagaatcaacaattcggattgacaagaactgttcaaattaatttgacctgtagattctgagccatgtttttattaaagtcagatctattcctaaatacaaaatattttgaagatttattaaaactgaatattacaatgcaaggtaaattaagactaaaggcacataaactttggtcccacctggttgtcagttttagaaaactgccacaaaattaatcttcctgcatattttcgcagt

SEQ ID NO: 1092 - DNA, 456 bp, Homo sapiens
actttggtttaaaaaaagagaatgtaatcttttttcagcaaggaatgctccccgccatgagttttgatgggaaaattattttggaagagaagaacaaagtttctatggctccagatgggaatggtggtctttatcgggcacttgcagcccagaatattgtggaggatatggagcaaagaggcatttggagcattcatgtctattgtgttgacaacatattagtaaaagtggcagacccacggttcattggattttgcattcagaaaggagcagactgtggagcaaaggtggtagagaaaacgaaccctacagaaccagttggagtggtttgccgagtggatggagtttaccaggtggtagaatatagtgagatttccctggcaacagctcaaaaacgaagctcagacggacgactgctgttcaatgcggggaacattgccaaccatttcttcactg

SEQ ID NO: 1093 - DNA, 441 bp, Homo sapiens
actgtttcctcagcagaggagaaaaactcaacctagttatgagaccaaccacacaacacaatgaaaagctgcactaactagttcagaatgttagttaagatgatgctggtgtgaataactcgttttttctagagcccttataaataaaatcccccagttagtgtttgcattatcagctagagggttaacatgtggtagaatgaggacttatgcaaggtataaatgcgcatagcattttactactatgagaacaagtgcagtcagaagaaaaccaactggactctaaattacacacaccttaatgacaagactccccaccacttgtgaatgtaaaacatttaatttaaaaatgttgatactacaatatataaaatagctattataaatgcacatagtgtattctatagctgccaggtttacttttttttttttaaggaaact

SEQ ID NO: 1094 - DNA, 269 bp, Homo sapiens
  misc_feature 19: n = A,T,C or G
cagatgaaaccaggtcacntggggagtctgcttcatttcctctgagctgttatcttgtgtatggatatgtgtaaatgttatgactccttgataaaaaatttattatgtccattattcaagaaagatatctatgactgtgtttaatagtatatctaatggctgtggcattgttgatgctcacatatgataaaaaagtgtcctataattctattgaaagtttttaatatttattgaattattttgttactgtctgtagtgttttgtggagt

SEQ ID NO: 1095 - DNA, 318 bp, Homo sapiens
  misc_feature 9, 40: n = A,T,C or G
actctagtntaatatcacttcacgacaaaagatgtgaatnggaaaaacagtttagatcacaagaaccataaaatgtcaccaggctcacacaatcatttaagaaataaaaacacatatacaaaaatgtaggctgcccctacaatctaatttatgataaaataagatgaatttcagcctaagaatacttcatttattttcttagttgtgaaaaaattagttaagaaccttaaaaagaactttttactctaaccagatcttttaatttcctagaacatactctaatatactagttttcctaagcttgaaacaaatcacagt

SEQ ID NO: 1096 - DNA, 530 bp, Homo sapiens
actgaatgccattaaaacagaagaaatgaacataatcccgaactcccaacagcatctgcaaaggaatggaaatcttctgaaaatgacagcgcagtaacagaataattcaagcggaactgaagatctatccaaaccatgttcctgctctgaaatcagggttgtgtttggcaaagctttccccaaactattccattcacggtggcattgttccttttgttggtaaagggagacggaaaaaataactctaaaatggggctccattaaaacacacacaaagcaattaaaagctttttcatttttaacttaaaatacttcctggtttcacaaaggcatgtccatacaatttcctcaacattaatcttcagatttctttagttaatgcaaaacattaaaattcacttacttttttgtatttcaaatgaacaagtcagaacattaaagcttgctttatatttcatccaagaaacagacaaatcacctaaaaattgctttctgcctatgtatgtatgcctgaaacatttgcatgagag

SEQ ID NO: 1097 - DNA, 219 bp, Homo sapiens
actccattcggacttccagccatctgttggcagctgtgaggaagagggaagcaatgttgttggagtctgtgtattcgagaagcttctgccggaaccgggcctcatacctgaaggcccggatggtggtgagtccttctacggtttcggcaaagtgtgagagaagtggaagctgggtggtgtcatccagctgctgcaggtccctggacgccacccggaagt

SEQ ID NO: 1098 - DNA, 427 bp, Homo sapiens
actgttgctgacattacaaaaagggtctggaagggaaaccgtgtcactgttttatctttttttctttaaaatacaaaagtatcccaactaatcatttattatggtcagcttgttttacatgtcccctatcatgagaaatgctatcaacatctgtgatttctaagagtcttaccaaattgttactttaattcttgtgtcctgctgagtggtttttcttttaaaataccatttttatcaccctgtggcactgggtgtgttactgcgattacactgatgattctgagctgtgcttcttcaagtagctcagttcttgcgttttatattaggtaacagttttgtgatgcttttgtgcattctttgtcatctcttctgagttttcgaatctgtcataaataaactttttcactatgcacctggtaaaaaaaaa

SEQ ID NO: 1099 - DNA, 593 bp, Homo sapiens
  misc_feature 527: n = A,T,C or G
ctttttactccatcttaatgacataaaaattaagtgaattagagaactacaatgatcttaaaataatttttcaggcacatttcataaatgtggaaactgaggcacggatctgtttttgcctatgaaagataggtcctgtaactgttacacagtttaacacttctgaaattagaatattagagatcctgctaaatattacgtattgtttccttggcctctcttaatagtgccatttatatttttaatttaccagagttaggctcattaagatagtgtttgctttgaaattaatgtttctgtggaaactaattttaacttttacagatattgattacgggcttgtgaaaaggcaagtaaaggaggaatgctgtgctatctgggcattaaaacaaaacaatacaattaaaagttaaaaagaaagaaaaaggtaataacagatttgtgtggaaggagggcaaaaaaacttcacacgtggattatctgttggagaatgtgcattgcaaaaaagatgcaaaatagcaatcctncctctagcttgatggaaatgtgttttttccatgaaacatatatgtattttacaaatgaaagatgat

SEQ ID NO: 1100 - DNA, 524 bp, Homo sapiens
actctaatttagccaagtaattgctgctgtaaaatccaaatctacagagcgcacaattttttaaatggagtgtgcattcctcaagcaagactaaaaacaatcttacttgggtctctaatattaagcttcagaacagttttgcaacttttgacctgaacaaatctcttatccataaaacaagaggaataaaagattgcatacgtgcatttaaaaagtaactttattactcccaggtcaaaaaaaaaaaaaaagggaaaagaaggagaaagggaaggatgagggggaggagggaagaaaggaaggaagaacaaaaaaagaaaaaagaaaagaaaagaaacagaaaggcactctatctacctatacctatatattttacttgtatttctaatcttggactatgtaattacttcattcacttgtgtgttttaattttcatggagagagaagagaaagaaagattttccagaaaaagcaaaaactgtgtgtgtgtgtgtctgggtgtgtatttaaataacataaacaaa

SEQ ID NO: 1101 - DNA, 479 bp, Homo sapiens
actgctctggagttgctggaagcccaagcagctactggctttatagtggatcctgttagcaacttgaggttaccagtggaggaagcctacaagagaggtctggtgggcattgagttcaaagggaagctcctgtctgcagaacgagctgtcactgggtataatgatcctgaaacaggaaacatcatctctttgttccaagccatgaataaggaactcatcgaaaagggccacggtattcgcttattagaagcacagatcgcaactggggggatcattgacccaaaggagagccatcgtttaccagttgacatagcatataagaggggctatttcaatgaggaactcagtgagattctctcagatccaagtgatgataccaaaggattttttgaccccaacactgaagaaaatcttacctatctgcaactaaaagaaagatgcattaaggatgaggaaacagggctctgtcttctgcctct

SEQ ID NO: 1102 - DNA, 264 bp, Homo sapiens
acctcgaccagacccaggcttcatccacctttctgatggatgcggttcgtcatccctttgtctgaccccatccctttgtctggtctcttcccaggggacccaggctcacccaccagagctgctcagacatcgcccaaggacacagctccaacctggacccaatcacagattttcagccctcacttgtcagacccagctcgacctgtctgcctatctttagctccaacgtccttaccagactggtccagttctgcctacctgagt

SEQ ID NO: 1103 - DNA, 484 bp, Homo sapiens
actctttgaggacatttttgtcagattaactataacagtgtagtgtagtttttaaaattgcagttgaaaagtttagctgtcttggaagtcaaatttatccaattgttcagacttctgttactacttaatatgaagccaccatgctggcttggacagaattaatttcattcatgttatggagaattctatattacaaatctggtcccctataatatgaacagtgagcagtcagaaatatacaaagggttaaatagggtaaagactttggccaagaaaggaaaggccttagttctaccatagagtatcttctctaattaaaatgactgggaaatatatggaagcagaaaccagcacaaagcactacccatctagaaataatctttcagttaaaaaacaactctcaaaaccagcactcatttctctaagataggttataagtattttacgatttcttgttatattaaattgagttaaaggtacctgc

SEQ ID NO: 1104 - DNA, 311 bp, Homo sapiens
gaagctatgcatttgaagagctctgaactgcaccagtgttttcggttgtgctgcaggttgctaagtcaagtcagccttaaccttttgcaccagttggtcggctgtttggcagaacattctcagatcttttcagtcaaaaatctaagatgatttattttgtatcactttgttaaaagctgaatattgttaactacagttaatattaacactgtatttatactttctcaaactacacccgccccaccacttctggttgcctctgttgactattaatccagatgtaaacaaccagatgtttttttctaacttgt

SEQ ID NO: 1105 - DNA, 258 bp, Homo sapiens
acttctgtggtgggcagaagccttactaaaggggaagacagactttgaagtttctagacgagaaggaggctagcttctagcctgggtggccattattccaaaaggtcattgtttctcactagaccccagggcaccagatgaatttccaagtttaaactctttcctgcaggtgattactttgaaaaaggttggtccagaccattttgatcaagaacctgtatatgtgttgtgttagaggcatctgcctcaagtctatgt

SEQ ID NO: 1106 - DNA, 534 bp, Homo sapiens
  misc_feature 520: n = A,T,C or G
actactaaattaataaatttattccacttttgaaatgacagccaaaaatccacctaattgattctcatttggcacgttcttctcaattctgttcactaaattaaaattactaaatttaaactgccaagagccatgatgttgtctgcacaagacaacattttccatcactttcagaaagttatatttggcatgttaaggaaaaaaaatataatcccacagcagcagctatttaaaataagacagccacaggattcatgcagaatattttaaatattcctgttgaacacaatgatttaattgattttttcttcacggatgatgctcccaaacatcctatatgcatccatggaaatttaaagatcctggaatagcgtcttccatgtgggacatcttaaaagatagtattttggcttcagtgagttacacaaatgaatcaccagtccttattaattcaatgggtctgtttacagagtgtggtaatttcgttctttagatttgcagaatttataaagaaagaaantacagcctgcacac

SEQ ID NO: 1107 - DNA, 488 bp, Homo sapiens
acaatgtagtgtatcatgaagaaagaaataatatgcagatgtattatgaaatgtgttttattttcaaatgtgtggtgttgacaatatattgatttatcaagatactaagggaaaattctaaatttaacaaaatgtgtatattttaataaatgcataaagctttattgtgtgcctttaaatttaaaaatgggtttataaagaaagtcagaaacaaaagtgtcttactataaaatatccatagtaatgtaaagcttttacacgagactaccaaaaaaaaaagaaagaaaagaaaaaggagccttcccatattttgttaaccttaaccagtatctgaagtctgttactttttttccattcttaaatggagatgaataagtgaatttcgccttaagtgtttcaattgtcctttgtagaaaagccagataaatgagttcactttgaattgcattattgtggaaaattcattttcagaataaacattttaaaag

SEQ ID NO: 1108 - DNA, 453 bp, Homo sapiens
acatttatctaaaagaaaatttggtctcaggcacttcaaagtatgctgaagttttcattactaagttttaaagttggtaatgggaattgagttgatgtctactctatttaatttgaatggcttttgaatatacaagattaaaatattttgtgatgatggttattagggcagtttaggataaggattaacacagcgaaaaagggctttttggaaaagtgaaacgtgccttgtttagcatataagccctcctttggtgtttcttttgagcaatttagaaaaatatacatcctttcttagcccgtagcagcctccaaaaataacttgattataaatcaagtatatctgtcatttttcttctcctctgattcacttaaaagcacaattgtgactgagaaaactgtgctcttcgtatttatgtcttcaagaatgtgtgggtttggcccagcatcatgg

SEQ ID NO: 1109 - DNA, 426 bp, Homo sapiens
tttgcacttaaccactaaatctttattgaatttttattgtaacagcaatgcaatattagcaaatagagagaaatatagagtgaagagaatacagcaataaggttagaaggaggggtaggggcaatggggttcagtggtaggaggagggctactgacaggggtaaaagcaagggtttttatttatcacttttataacttccatgaaaatttaccatccatcattgacaagttcattctagcagtaatttatcagaggtcactcatcctctattaaattattaatctaatcacctttgaactttctcccactggggtttttatccatgtccaattcgctctaaataagttggtctccctgcagttccctccgagtttatttgaaatctttaaggatagcaattatagggtaaagggttacaagtaagt

SEQ ID NO: 1110 - DNA, 536 bp, Homo sapiens
  misc_feature 507, 526: n = A,T,C or G
acatagctaccagttgagcatccctaatccaaaaacattgaaaatgaatgataaggcatacctgacagatgcaaacaaatgtaaatcaagagagataatatttttaaaaagttaacagacactaaacagaatgaagaggtcatctggtaatgttaaagacataacttatagagaaggtgtgatcataactaaaaacctgtgaaacaaattcttaggaacgcagggagaaaaagataaaaatacaatgatatgggagactttgttatactttgctcagaagtgaacaaccttaaaaaataaagactgagaagaaatgaataatacaatcaacaaacccaatatatatgtgtgcgtatgtatgtgcatagaatacagaatagataaatgtccatgaatatctatgcaatactgattgtgtattttattctaagaaaaactttgtaaaccaatctttaagcgaaatttaaaagtaagaattttagagattgcactctctgatcacatctnacaaaattataaatgagtnatgatagcct

SEQ ID NO: 1111 - DNA, 453 bp, Homo sapiens
ggaatttacagatacccccagaagacttaattgagatgctcaaaactggggagaagccgaatggatcagtggaaccggagcgggagcttgaccttcctgttgacctagatgacatctcagaggctgacttagaccatccagacctgttccaaaataggatgctctccaagagtggctaccctaaaacacctggtcgtgctgggactgaggccctaccagacgggctcagtgttgaggatattttaaatcttttagggatggagagtgcagcaaatcagaaaacgtcgtattttcccaatccatataaccaggagaaagttctgccaaggctcccttatggtgctggaagatctagatcgaaccagcttcccaaagctgcctggattccacatgttgaaaacagacagatggcatatgaaaacctgaacgacaaggatcaagaattaggtgagt

SEQ ID NO: 1112 - DNA, 374 bp, Homo sapiens
acccggtacacccagacccacaccaaggcccaggcaaatggacatccatgcctgcacttgcgtgccggtccctgtgtaagccctctctggacccactgcaggaaacaagcccaaacctgtggtgtccaaagagaaactagtcagaaaaccaggccaaaaagataccctgtgacctcccacacctgcacacacacccagagctagcatagaggctattcccagcagccccagagtcccagtggcggtgcctgcttctctctttccagatcgggatctgcggccgcaccggcagtgggaagtcctccttctctcttgccttcttccgcatggtggacacgttcgaaggtgagttgtaaggcgggcaccccacgtgt

SEQ ID NO: 1113 - DNA, 461 bp, Homo sapiens
acatgactctacccatgttcctttcctgcacttgatacagagaaaacttgtaacaggaataatctttgcattttactctacagagtattacagtatttgtggcaaatttggaaaaccagtgttatggttttctgattttactttatgcagtttatttcttaaaagaaaaaattcttgcagaacacagacatgaacacagagtctttgaaagtttaagagtatgggcttcagtgtggatatttctcaaaagatgtagaatctcccaactcaaagtgtggtcgatggactggcagcatccacatcacctgggagatttgagagatgaagaccttcattcctcatcccaaacctactaaaaggaatctgtattttcacaagatccctagtgacttgtatgctcaagaagcactaatgtaatgtttttaatccacccaaccctaaaggataatccttgagaaaga

SEQ ID NO: 1114 - DNA, 399 bp, Homo sapiens; identical to SEQ ID NO: 566

SEQ ID NO: 1115 - DNA, 395 bp, Homo sapiens
acttttctgtaaattaaaagaatatggagtcataaaatggcaagtgttttaggattagcctaaaattggacattgtcattgatttcaaagaaggtatgaactagcagtcttacagcctaattcttctttggactggtccttggcagcagttccttttcagactcgataaacagaattcagatgatgtaagtcaaaacaaaactttacaaagccaagcgtattatcttttgcattaacctatttttttccatcatacatgctactagtatgtgcattagcatgatattctcatatacattgcattaaaaattaaaaggtggcagctcagggtgagctcttctgttgctcatttgttcctaaatttttaagggctttttctcagtcaatagtttgta

SEQ ID NO: 1116 - DNA, 510 bp, Homo sapiens
actgcatttgcatctccgagattagggagcacttgtcaggatatgttgttctatcagggttacttctgttgactacctcttagattttgatacagttatattgttgagtttcattttcatatattcttgtagtgtctgcttgcctgtgacttctggtaaaataaaataagcctttgaaaatattttagcatggtatttaacattttctaaatattatggcattttgacatattttagtcagcgaagacatctgcccctttggtgtttctacttgctaatgattgagattttacaagcccttcaaactccgttttaaaggaatttattgtaaaacattaactttaataaattagtgttttcacagatcagatcattatacttggaacttctaaatcatgcaatttctgaataaggacataaggctagattcatttttcttaatagagaaaaaggaaatttctgatttatcacttttctagttgataagtaggattcaaaacgtttgatatg

SEQ ID NO: 1117 - DNA, 415 bp, Homo sapiens
acggtagaactgctattattcatcctatgtgggtaattgaggagtatgctaagattttgcgtagctgggtttggtttaatccacctcaactgcctgctatgatggataagattgagagagtgaggagaaggcttacgtttagtgagggagagatttggtatatgattgaggtgggggctagtttttgtcatgtgagaagaagcaggccggatgtcagaggggtgccttgggtaacctctgggacccagaagtgaaagggggctattcctagttttattgctatagccattatgattattaatgatgagtattgattggtagtattggttatggttcattgtccggagagtatattgttgaagaggatagctattagaaggattatggatgcggttgcttgcgtgaggaagtacct

SEQ ID NO: 1118 - DNA, 376 bp, Homo sapiens
  misc_feature 168: n = A,T,C or G
acctcccattcttgtaaatattgactgctcctttaacatggcagtaacatttacggaagtgtcaaatttagactgatgcttgatgggggaataaataaaactttagactaagtcagttaagactgctgtcagctgcatttaataggaactttactgtggtattattcntttgtaacaaaaggttcattggtgagcaattcaggaccagtaaggctaaggagtcactgaggacccagttccttataacttactgttatatcatccttacgatgaggcttctattcttatgattgtaagatggctattccattttaagatatcatatcacatcccaagcaggaagcaggggaaggatgatgggcaaaaagcaaaaggt

SEQ ID NO: 1119 - DNA, 442 bp, Homo sapiens
agacaccaccacgggaggagcaggcccgacaggtcctctcaaggagggagtcttccctctgaggaaaagggacacccccaggaggaatctgaggagtcaaacgtcagcatggccagtttaggggaaaagagggaccaccattcaacccactacagggcttcagaggaagaacctgaatatggagaagaaataaagggttatccaggcgtccaggcccctgaggacctggagtgagagcgctataggggcagaggaagtgaagaatacagggctccaagacctcagagtgaggagagttgggatgaggaggacaagagaaactaccccagcttagagcttgataagatggcacatggatatggtgaagaaagtgaggaagagaggggccttgagccgggaaagggacgccatcacagaggcaggggaggggagccacgtgcct

SEQ ID NO: 1120 - DNA, 246 bp, Homo sapiens
actgtggaaaccaaatttgaatactgcaaatttgtgggagttactaggttagcaattagtccatacatccataagcctgatgagttgaaattgcagtttgagaagtgaattaaccttacatccctttgttcagataccttaaaagttactttatttaaaagcatttattaatcttagtctgaaatcaaaatatagattaattggctcagctttaatacctttctaggaggtgtcacaatgtagggt

SEQ ID NO: 1121 - DNA, 527 bp, Homo sapiens
acaaaggtcaagccaattttatgaaacagtcctacagagtaatatatgtgatgcagtgtaagaaggaaaatactcatctctaacattatggtaataacatttagcctcttaggagttggagcagggggatgggtaattacagatttgcagactatagaaagagtttcatttttttgtgaccccacagagtctcaaatttttatttcactacctgctagagcctactgtgaaatcactgctccatatttgccagtggaggaaatgggcatagagtagagaatagcttcatatgtttacacgtttgcatagactacacacatgtcatgcgtttatggcaggtagctggtatttattccccaaagtaataatgttgaagtatgggtctcatcattcccatacacagaaacacaaaacactttgatcataaacttttttcttcagaagccaaactaacttgcagaataatagagccactggtttaatgtttcctcaagataggttttagtgtaagctagtattctgtgtgt

SEQ ID NO: 1122 - DNA, 407 bp, Homo sapiens
  misc_feature 398: n = A,T,C or G
cacagctccccacattcgcacccctgcccgcgcgccgggccgcctgactgcacggcttcccctccagccagatgctggagaacacacactgattcgctgctttccaagaccctgttcagtctctttctctatacaaagatttttttaaaaactatatataagaattctttatttgcaccctccctccgagtcccctgctccgccagcctgcgcgcctcctagcaccacttttcactcccaaagaaggatgaagggtggttgtgtctcccagtggaaggcggccgccgggttcctcttctgtgtcatggtttttgcatctgctgagcgaccggtcttcacgaatcattttcttgtggagttgcataaagggggagaggacaaagctcgccaagttgcancagaacacg

SEQ ID NO: 1123 - DNA, 524 bp, Homo sapiens
tacttactgtgtgcacatatactgctgcactgtttctcggctgtgaaaaattaaaagcattttttcaacctttgagaaggaaagaaaacaatgaagaatctcctcataataatacagcataacagggtttgtttactgtgccacatcatgggtgtttttaaaacgaaatataaatatatggttagggatagcatttttaggagaacaagtgaccaaaaactaagttacctcttttcaggtcagccaaaaaacgtgaagggaaagtggactttatacaacttagacatttatgtagatagcacagcagactcatgttcaagccagccacctgaaacattataagtccgtcgagggggacagcaatctatggtccatggactgaatccagcctacttttgtatggctctgagctaagaatcgttttaatattttttaaaggttgttaaaagcaaataacaaagaatacatgatgactctattcttgttctcatgtgtgaaccatatattatagcctgcaaagtcta

SEQ ID NO: 1124 - DNA, 511 bp, Homo sapiens
  misc_feature 489: n = A,T,C or G
aaaaattaatctcaaaggaagccaacaattatgaggaggatcccaataagcccacaagctggactgagaatcaggctggaaaaataccagagaaagtgactccaatggcagcaattcaagatggtcttgctaagggagaaaacgatgaaacagtatctaacacattaaccttgacaaatggcttggaaaggagaactaaaacctacagtgaagacaactttgaggaactccaatatttcccaaatttctatgcgctactgaaaagtattgattcagaaaaagaagcaaaagagaaagaaacactgattactatcatgaaaacactgattgactttgtgaagatgatggtgaaatatggaacaatatctccagaagaaggtgtttcctaccttgaaaacttggatgaaatgattgctcttcagaccaaaaacaagctagaaaaaaatgctactgacaatataagcaagcttttcccagcaccatcagagnagagtcatgaagaacagacagt

SEQ ID NO: 1125 - DNA, 147 bp, Homo sapiens
acatggaatgcttgtattctttttaattatcaaggcatcagtgtggttcttaaagccatgtgcctgtgtatgcttgcctaagtgtgaatgacatacacagacataaccttacattgctttcccaaaaggggaatgccaccaacaaat

SEQ ID NO: 1126 - DNA, 273 bp, Homo sapiens; identical to SEQ ID NO: 706

SEQ ID NO: 1127 - DNA, 427 bp, Homo sapiens
  misc_feature 50, 170, 357: n = A,T,C or G
acgccaactaaggggcccacaaagcaggcagaggtaatgcagaaatctgntttgttcccatgaaatcaccaatcaaggcctccgttcttctaaagattagtccatcatcattagcaactgagatcaaagcactcttccactttacgtgattaaaatcaaacctgtatcancaagttaaatggttccatttctgtgatttttctattatttgaggggagttggcagaagttccatgtatatgggatctttacaggtcagatcttgttacaggaaatttcaaaggtttgggagtggggagggaaaaaagctcagtcagtgaggatcattttatcacattagactggggcagaactctgncaggatttaggaatattttcagaacagattttagatattatttctatccatatattgaaaagaataccat

SEQ ID NO: 1128 - DNA, 241 bp, Homo sapiens
  misc_feature 168: n = A,T,C or G
cgacgaaggagtaggtggtgggatctcaccgtgggtccgattagccttttctctgccttgcttgcttgagcttcagcggaattcgaaatggctggcggtaaggctggaaaggactccggaaaggccaagacaaaggcggtttcccgctcgcagagagccggcttgcanttcccagtgggccgtattcatcgacacctaaaatctaggacgaccagtcatggacgtgtgggcgcgactgccg

SEQ ID NO: 1129 - DNA, 318 bp, Homo sapiens; identical to SEQ ID NO: 532

SEQ ID NO: 1130 - DNA, 446 bp, Homo sapiens
  misc_feature 417: n = A,T,C or G
acactgttaagaagttgagcttttatcttagaggcagcagaaggtttggagccaaggaatgaaatgatgaggcgtccttcaggtaatgaacttcagctgcagtgtgaaaggggcaggaagactggcagctgtcaaaactggaacagtccagtgagtatgtgcaggcccgggcttgggcagtgacgagggcagggagcacacatcaatttctgcggtagaaccttctagaggaagaccagacagagggtcaacagagttgaaaggagaaaataattgaggatgaggtccaagtttttagtttcagagactaggcatatggttaatatttaggtaggaaattcaggaaaaggagcttgtggggcaggaagggaaggaacggcagcttggggcactctgacatctttaacaagtcttgtnaaggcttactaaatacaacgaagcattgt

SEQ ID NO: 1131 - DNA, 441 bp, Homo sapiens
acatgtgagatgccagggctggctaggtcatttctggttcattgtcgttaagcaggtaatagaaccaaggctcagagagatcaagtgacttgcctacagttgcccagcagatttcaatccaggtctgtggggctgtcctacctcctccttgatcataccgtgcttttctctgagattgggactccacagccctcccaggacataacccctctgcttctgctgatacagccactctctctcccctctttatttacaaccacctatttgaggtttttctttttcttttccttccttgtttcttttctcttttctctgtctttaactgaaaaaaaaaaaaaatcagtggaacatcaaaattgaggacctttagaaattccaccacctcagcttgaattttttaactctcttttgtttttattattatactttaagttttagggt

SEQ ID NO: 1132 - DNA, 489 bp, Homo sapiens
  misc_feature 446: n = A,T,C or G
gaaaagaggaaagttatatatttgagtcaaagggtgatggaggaggaggggaacacccagccccagaaacaggtgcagtgctacccctggcgctgggtttggctatcactgctctgctgcttctcatggttgcatgccgactacgactggtgaaacagaaactgaaaaaagctcgtcccattacatctgaggaatcggactacctcataaatgggatgtatctatagtaatgtaatttcaataccttggggcagggacatgttttgtttataatttatacatctattaagttctggatatttacagcttcttttgtttttaattgggccagaagattctgcaaatcccaaatctttctttattatttattgtaaaaaaagtttccttagaagtcataaaatattttgaaatttagagaggaattcatgattaaagattcctaaaantataattctgatttatgtaagctgtccctgaaatagaatgtgt

SEQ ID NO: 1133 - DNA, 297 bp, Homo sapiens
ctttgctcacatttaatttttattttgattttttttaatgctgcacaacacaatatttatttcatttgtttcttttatttcattttatttgtttgctgctgctgttttatttatttttactgaaggtgagagggaacttttgtggccttttttcctttttctgtaggccgccttaagctttctaaatttggaacatctaagcaagctgaagggaaaagggggtttcgcaaaatcactcgggggaagggaaaggttgctttgttaatcatgccctatggtgggtgattaactgcttgt

SEQ ID NO: 1134 - DNA, 160 bp, Homo sapiens; identical to SEQ ID NO: 665

SEQ ID NO: 1135 - DNA, 301 bp, Homo sapiens; identical to SEQ ID NO: 808

SEQ ID NO: 1136 - DNA, 430 bp, Homo sapiens
  misc_feature 416: n = A,T,C or G
acggtagaactgctattattcatcctatgtgggtaattgaggagtatgctaagattttgcgtagctgggtttggtttaatccacctcaactgcctgctatgatggataagattgagagagtgaggagaaggcttacgtttagtgagggagagatttggtatatgattgagatgggggctagtttttgtcatgtgagaagaagcaggccggatgtcagaggggtgccttgggtaacctctgggacccagaagtgaaagggggctattcctagttttattgctatagccattatgattattaatgatgagtattgattggtagtattggttatggttcattgtccggagagtatattgttgaagaggatagctattagaaggattatggatgcggttgcttgcgtgaggaagtacctnggcccgaccacgct

SEQ ID NO: 1137 - DNA, 508 bp, Homo sapiens
caggagaatcacttgaacccaggaggcggtggttgcggtgagccgagatcacgccattgcactccagcctgggcagcaagagcgatcaaaaaaggaaataagaatgtaggataacacccaagttttgaccttggatgattaaaggaccacaaaggaaaacaaacttaaaccttacagtcaaagtggtaaaggtagagatgatgaatgttaacttcgaatatgtctaatagtcagttgatatcaatggatctggaattcaggaaaagtgtctgagatatccaggagattcattaggtcatcagcgatcaaaggttagcattttattatagatgttcactgtgttattataaataacgttaaaaaagagaaaaataaaaaggaaaggtcttaaacatgtaacagttgcagattggctcatttatgttacagccatatattgaaatgcaattcagaccttaaaaatgagtgctggctttgggaggccaaagtgggcagattacttgaggtc

SEQ ID NO: 1138 - DNA, 409 bp, Homo sapiens
accacaggtcgaaattcgaccttaaatattacaatctagcagtatctggctggccagagtgggccggcccctgccagcatgtgggcacttcttcattaagtctattctttggcagctgacacgcgtgctgacagagaaaaatccagtgacttgttgctagggatttcacgactaatgtttttgcaagcatgtgtatttacaactctgtgtttttatttcctttaggagattttactctgaaatacagtttctttcttcccccactatttgaaatctgggctaaatgaatgtgtaatgtaattgatgaataaaattatgtcagatatagttaaaaaatccaacaatttcagtattcgtgtttacgtaaatgcattttttttaaaaggattaagcaatgttctaacctagt

SEQ ID NO: 1139 - DNA, 505 bp, Homo sapiens
actatgtatccactggaggtattggaatatatcctccttgaataaggcggcactagtataatgtttaataatggcaattatgcttattgctataatgtttgtattttatatattaattaaatttgcattttataaattactttccttaagttacctcatttgattcttgtaacaattctgggagggaagtaggatatatatgattctatttttcattttatttcattattattttatttcctcctccccctgagctttattgaaataaaattggcaaataaaaatcaaatatatataagagggacacaatgtgatgtctgaagtacatgttaactgcaacttggttagatactcttacaaagagatccacaaaaaatccaccctttctttctgaaatctcctctagtaactccataagtttagcagccaaaccaaggcgtcgaaattctggggcaacagacagagctgtgacgtgcccgtgccattcttccctagctactgagcc

SEQ ID NO: 1140 - DNA, 373 bp, Homo sapiens
  misc_feature 358: n = A,T,C or G
aactgctttcagagagaaaacctttccaagagagttttgttttgttttggtttcgttttgtttgagatagggtcttgctctatcacctaggctggagtgcagcggcatgactgcagccttgaactcctgggcttaagtgaccctcccacctcagtctcctgagtagctaggactacaggcacacactactgtgcccagctaacttatttttattttttatggagatggggtcttgctttgttgcccaggctggtcttgaactcctgggctcaagcgatccgcctcagcctcctaaagtgctgggattacaagcgtgagccaccacgcccggccttttttttttttttttttttttganatggcgtctcacctg

SEQ ID NO: 1141 - DNA, 585 bp, Homo sapiens
  misc_feature 540: n = A,T,C or G
acaagggccctggggaccctcgaagcagaataaatgataggttgtctgtaattcactcagataggtataaaagttaaaactttaagcagatccctttagaaaaaggctctcttctaaaacgcacagtggaatgtcaagagtggcagggtggggagggggcagcgcgccaaaaaaatctgcaatcaaataatatcataatcttcataattaatataaataaataaagaataaataacaattactcataaatcaacatatacatttagagggaactgatagtcctacctcaacaaagatgatcaaaccaaaaagtcttacgtgaaacactgaggcagttactacagcatcttcggaacactcccttccctccccccacaaaacaatcccagacaacagttcaaggcatttgtggctatactaaagaaaactcttttttaagcaatttgatttgttcacatacaaaaaggtaaagccagactccagcagttcacaagccataataaagctaatcgtgtgggaagttcaatttacagcctgtgnaatataaaggcatttactcctcaagattcacccaaaacaacccgt

SEQ ID NO: 1142 - DNA, 513 bp, Homo sapiens
  misc_feature 494: n = A,T,C or G
acactagcacgccagtcaccacccagatgcacaggatggagagcagggcaccaaggatctctaggaattcaaacacacacagaaacccacacacagataactccatcacctacacctacacccccaagagtcataagacactttgccacttcccccaaaaaggcttcacattagttcatccagtgattcacaaagtaaaagtgtggatggattttaaaactaagagaaagtattttaatgttgcattcataaaacaccagcatctgagtcactatgttccatcttactaagtaatttttcagcaaatttttagaacatattaattgctgcctgcccctaccccctgttttccttggggatcttaatttaaacaggtgctaaaatgattgaaacttattaggaggtaaaataatgagacacagagagtaaaatgtgtttagaaactcttaattttgccataaaaaatttacgacctgccagtgccagcaccttcnatggaataaaatagtgaaa

SEQ ID NO: 1143 - DNA, 273 bp, Homo sapiens; identical to SEQ ID NO: 745

SEQ ID NO: 1144 - DNA, 550 bp, Homo sapiens
acttgaaagatatgaattgatatttttttcacattctaaattatgttaaaaccccttcaaatctcactgtttgctcatgcatcacctattagagcaaggtgctctctaaaggtgtgattttggcatctcataggcttccttgaaagccaagcaccagaggtctgcaataaaggcagttgccagctaaatgaataaaagcgagatttcctcaattcaactataaaagcttagagtcctgactgctgaattaccaccaacttgtaaataaataatcactactaaatacagataatgtgttaaacagctaacactagtaaatcactggtgacagagagcctaaaggtaaatccctcacacattggcacaaccaattattacaatcttatggtgttttaatgtcctcagacacatataataaattgaacaactggttacttagcattaagaatgtttataaaataaaccctactctctttgctggtttcatttacatactgctttagattttactaagtggatatctgtctagtaagagagaagcaacacttgg

SEQ ID NO: 1145 - DNA, 188 bp, Homo sapiens
  misc_feature 178: n = A,T,C or G
accatgtatttcccagagaagcaagtaaagaggcactgttggctacagggcactttattctgagttgattaaatgatatttgaaaaaggtttacaaattgtgcatgccgttccagacacacactgccatgttcttctgtgttaatagctggccatgaatagtattattccatcatttncacctaattc

SEQ ID NO: 1146 - DNA, 455 bp, Homo sapiens
  misc_feature 395: n = A,T,C or G
acaattgctgttcaaggttagttttgctatatatacatatatgcataatataagcatatcctgaattgcatgtttctaggcttcatattaatatataaattttatttctagttttagcctcatctggcatagattatgacataaagatctggtcaccattagaagagtcaaggatttttaaccgaaaacttgctgatgaagttataactcgaaacgaactcatgctggaagaaactagaaacaccattacagttccagcctctttcatgttgaggatgttggcttcacttaatcatatccgagctgaccggttggagggtgacagatcagaaggctctggtcaagagaatgaaaatgaggatgaggaataataaactctttttggcaagcacttnaaatgttctgaaatttgtataagacatttattatatttttttctttacagagctttagtg

SEQ ID NO: 1147 - DNA, 431 bp, Homo sapiens
acaggagatctcatttgggacaactaaggataaaatgctggtcatcgagcagtgtaagaactccagagctgtaaccatttttattagaggaggaaataagatgatcattgaggaggcgaaacgatcccttcacgatgctttgtgtgtcatccggaacctcatccgcgataatcgtgtggtgtatggaggaggggctgctgagatatcctgtgccctggcagttagccaagaggcggataagtgccccaccttagaacagtatgccatgagagcgtttgccgacgcactggaggtcatccccatggccctctctgaaaacagtggcatgaatcccatccagactatgaccgaagtccgagccagacaggtgaaggagatgaaccctgctcttggcatcgactgtttgcacaaggggacaaatgatatgaagc

SEQ ID NO: 1148 - DNA, 238 bp, Homo sapiens
tcttctctcattccgccaaaacagggctcagttattcatttgccaagcttcgtggaggaatgtaggtgacatcaatgtgataaagtctgtgttctgagttgtcagatctcttgaagacaatatttttcatcacttattgtttactaaagctacagccaaaaatatttttttttcttattctaaactgagccctatagcaagtgaagggaccagatttcctaattaaaggaagttagat

SEQ ID NO: 1149 - DNA, 252 bp, Homo sapiens
acttttagtagagacgaggtttcgccatgttggccaggctggtctcgaactcctgacctcaggtgatccacccgcctcggccttccaaagtgctgggattacaggcgtgagccaccgtgcctggccagaataggttttttctttcaacttgatcagtagaaaatggatatcaagtttgaacagataaatcatggacagccttattgtgattgaaatgcttgtaggttctgtgccaattttccaccactgtgt

SEQ ID NO: 1150 - DNA, 318 bp, Homo sapiens
agcaagcacagttgagggacaaagatagagtgctatcttagtgatcttagtgatcagcccgtggatcaagccatgcctgaagcctaacccagcctttccagaaacatgagtccataaagttttttttgttttttgcttaagcccatttcagttggactttctgtcccttgcaccagcttttgccttgctcctctgccacagacacagggccctctgtagctctgagccccactcaggatgcatacataccatgagaacagcaaagtaggtgaggtggttgcagcggcagagcacctgagagtgggagggctgctctgt

SEQ ID NO: 1151 - DNA, 478 bp, Homo sapiens
acccagaccctccaaatccctgtcctgttggaaaaacagatgatggatgtctagaaaacacccctgacactgcagagttcagtcgagagttccagttgcaccagcatctctttgatccggaacatgactatccaggcttgggcaagtggaacaagaaactcctttacgagaggatgaagggaggagagagacgaaagcggaggagtgtcaatccatatctacaaggacagagactggataatgttgttgcaaagaagtctgtcccccatttttcagatgaggataaggatccagagtaaagagaagatgctagacgaaaacccacattacctgttaggcctcagcatggcttatgtgcacgtgtaaatggagtccctgtgaatgacagcatgtttcttacatagataattatggatacaaagcagctgtatgtagatagtgtattgtcttcacaccgatgattctgctttttgctaaa

SEQ ID NO: 1152 - DNA, 338 bp, Homo sapiens
accttttcttcaacaatgtgttaaaaactgagtataacccttaattcaaggtaggcctctacttctacctgaattggtacaaaattaagacattatcttgtaagaactaaaattgtatttgaaatttttattttagctgcaaaaacaaaaacaagcaaacaaacaacaaataacttgaaaataggcttgtcaaatgatgtaaattcatcctttccagggaagcagaaggtagaccctaccacaaagaaaagatgcttagttaatggaggttaaatttaaaaatacagttaaattcaggctaacttctgaaaatcccgttttattcacctcactgtggt

SEQ ID NO: 1153 - DNA, 371 bp, Homo sapiens
accaaaggacaaggtcttctacagcttcctgaagccctggctgggggatgggctcctgctgagtgctggtgaaaagtggagccgccaccgtcggatgctgacgcctgccttccatttcaacatcctgaagccctatatgaagattttcaatgagagtgtgaacatcatgcatgccaagtggcagctcctggcctcagagggtagtgcccgtctggacatgtttgagcacatcagcctcatgaccttggacagtctgcagaaatgtgtcttcagctttgacagccattgccaggagaagcccagtgaatatattgccgccatcttggagctcagtgcccttgtgacaaaaagacaccagcagatcctcctgt

SEQ ID NO: 1154 - DNA, 267 bp, Homo sapiens
actggtaggccacccacgctccggagctgactttgagggaacccacatccttgctggcccagcccatggagggcagggatgggtagtcatcaacgaggtcaaacttgcagccttggaagttgtccccctcaaacagtgtcacacggctgtcattgtggttcgcgcagagcactggccggaaggacagcagctggttgctgttgtggctgctgctgccactccaggcgctccagcgaggatagtctcccttctccagaatgaactgct

SEQ ID NO: 1155 - DNA, 273 bp, Homo sapiens; identical to SEQ ID NO: 745

SEQ ID NO: 1156 - DNA, 481 bp, Homo sapiens
accttttagagtaattattttaagcaaatagcctggacgtaagagattctcatgccagcatgcttccatttgtcagttgttgtgactgagagataatgaatgacacctgaaatgcatatggtatttttgggagagttaaggtataatttgaaggttggcagaccagttgtgctgattactcttagagaagaagaaatggaaaaatgaaagaaggcaggaaggaaagaaaggatataggaagagagggaagcagaaggcaggcatttttctattttccccacaaattatttcaaaaaaaatctgtattttctgggatatgtcattggcaagaggaagaactggtgttttgaaagcagtatggattctttaaatgcctctcactcttacaagatagtaggctttgagataataaacttacccgtgtcaattaacatttaaactggcatatagaaaaaaaggaggatttttctgcattgtaaaa

SEQ ID NO: 1157 - DNA, 494 bp, Homo sapiens
acaaacgtctgtctttaggacatatggattagatctatttagagtcaagaaaaagaaacattgcaaattttgcctggctatttcagagtaactgtattagaatttgcatcaaggctatgatgtttgctccatcatttattgattcaaataaaccacaacccacagcagttgcatttcatataagcagtcctaaattgaaaaaaaaaattcaatttaaccataattccaaagaacatcctatcccaaattaggtctccatatggagacttggatgtctcagagtttatgattaaaagtgatgatcacatattcttacttcactggacatcacctttcacaattttagaaacaaccattattgcatacactgtatacactgaattgggaatggatctattgttagaaataaaatgtttataaatacatcaaccaaagtaatctgctttggcctttctgggaatcactgattatgttttaaaacttcctttaattgt

SEQ ID NO: 1158 - DNA, 96 bp, Homo sapiens
acctgtaatcctgaagaaaaggtcctaattccttccatgctgaaatgctagctttggtttcagagagagactttattgcaactgtgaccaccgtca

SEQ ID NO: 1159 - DNA, 462 bp, Homo sapiens
  misc_feature 9, 56: n = A,T,C or G
acatcttangagatgatccaattctgggagttagcaaatgtctaagtgctcccctncttccacacataaggagagaaaagcattcatcagctgtgtgagtctgttaccagtgcacatgtgaggacagaccacagcacagtgagatgaggctgaggaaacgactacaacagcattggctatatcaggttttcttccttcttccagccacctggaaaaacgttcacagagagttatagtggttacaagaccaaaacttggaatcaaaaaaattaaataatgcaaataacccaattaatctgctaatatctattaccgcagaaatagtgttagaggtagtttattaaagaggcgtttttaaaatcatcccactcatcatatcctgcatttcaaaagtatcatcttaaaaaggaaaataaaaaaatactttttagagcataaagcataacaggttgaagtggtttt

SEQ ID NO: 1160 - DNA, 405 bp, Homo sapiens
accccaagtatttcaattagacttataaaagtataagtcaatctatggtcagtgtctttggttaaaaaaaaaaaaaaacacaggcagttctttacataaaaacgtcccacacgttatagatgccagtcacctcctggtagtcactatggacaactaatgagatgcaaagtcttttggaccgatgatgtctctactactggatctatctgtattaacagcaatgttactctcaatgaaactgcagaagccaccatgaacatggaagaccacctagcagatcggtgagtaggctgcttgttcagctttcctttaacacctgttggtaaatactaatgggagtagacagagttgtatggcctggacagtggaaaccaagagcaggatcgcaaagtaacagcatcagac

SEQ ID NO: 1161 - DNA, 339 bp, Homo sapiens
acctaatgcttgtgattaattttgagatttatgtatatttataagcctatcttatgtaaatttttactctaagatgtgtggcacattactaataaagacgtggatttctatttatgtaaagtaattgtagcaatattcctagatgctacctaaatgattgttctgtccatttgccatcacaaatacttttatctttggatgattatgttagtcagaatatattaattagatttaaactttaaaataagaattacaacatagtttgaaattcttcctgttgaagtaattaaagttagtttataattccttaaaaaaaaaaaaaaaaaaaaaaaaaaaaaa

SEQ ID NO: 1162 - DNA, 366 bp, Homo sapiens
  misc_feature 6, 18, 57, 80, 82, 147: n = A,T,C or G
gagatnatcttgaatatngtttaatgtctgaatatgaaagagttcttgatcctaaanatatttagtgtcacacaaaacanantgaatttgttagcataattattcctattcttatttcttcattttaagtcattgcaatggaaagtnatattataaaacggtaattacaacatattatcagtcacagttttctttccaattaaacacttaacttttgttattccctgtatataaatatataacacacattttctagattcacaaatttaaataaattactcaaaaaatgaaaattgattttgtaaacttttatttttactctttacgttgagttgatcaattttccatactaagattttcattcag

SEQ ID NO: 1163 - DNA, 244 bp, Homo sapiens
  misc_feature 195, 229: n = A,T,C or G
acatcaccttttaaagacaagtaaaccgaggcacagagaagttaaataacccatccaaggtgaaacagccagtaagaagtagaagttggatttaaatatttagcacgttgactccaaagcccacaactttaaccaccatggacaatggccccaccgtagagtggtttgggagccagtgggtagatttcttatgtncttgacttttactttagttactttattattattnttttttatttgagac

SEQ ID NO: 1164 - DNA, 293 bp, Homo sapiens
actcagaatgggattgcatttggagataaggcctttacataggggatcaaggtgaagtaaagtcatatgagtgggccctaatccaatatcactggtgtccttgtgagaagaggatctcctgagcccaggatttcaagaccagcctgggccatactgggagactccatctttacaaaaaaatgccaggcttggtggcatgcacctatagtccccagctactcagaaggctaaggcagaaggattgcctgagcctgggatatcgagactgcagtgaactgtgatcatgccactgt

SEQ ID NO: 1165 - DNA, 254 bp, Homo sapiens
  misc_feature 243: n = A,T,C or G
accaaactaactgacacagttgatttcaaacaaatacctgaagtttaatgatgaagtcaatgtttcagattatggaaattatatcagagatttataaaacaaatacggttctttatttcacagaatttttttttttttttttttaacacagtgtctcgctctctcgcccaggctggagtgcagtggcacgatctcggctcactgcaacctctgctacctgggttcaagcgattctcctgcctnagccttcccag

SEQ ID NO: 1166 - DNA, 491 bp, Homo sapiens
  misc_feature 414, 417, 437: n = A,T,C or G
acgtttagtgaaagcacaagaaaacaattatccatccctcctgtctccgaccagagtctccagagagctctgttaatactgcagcaaaggtgtgggattcttcccccatggcctgcagtctcagtggatgttccaatttagccagaaaggcgacctaagaattgccgggaggatggatggctggcgcgcgaattgttgcttttgctcttggctgatggttgaggaatgtagagagactgtgtggggtttgtgtgacactgcggtgccttgcagattaggtgagctttcaatctctctttaaaaggggcggcgaagaggacccgcaggctgcaaggagcaacagcgatgggtaggcacattcaaaaccagaaaaaattgttaacaaaccaaacaaacatgaagatcatactgggnaanctgaggccagagacccgggnagaaaataaaaatcatttaaaggaccatcagccatattggcatacatttgtgaa

SEQ ID NO: 1167 - DNA, 273 bp, Homo sapiens; identical to SEQ ID NO: 745

SEQ ID NO: 1168 - DNA, 355 bp, Homo sapiens
acacgtgttatggagtatattaaccgcctggataattatgatgccccagatattgccaatatcgccatcagcaatgagctgtttgaagaagcatttgccattttccggaaatttgatgtcaatacttcagcagttcaggtcttaattgagcatattggaaacttggatcgggcatatgagtttgctgaacgttgcaatgaacctgcggtctggagtcaacttgcaaaagcccagttgcagaaaggaatggtgaaagaagccattgattcttatatcaaagcagatgatccttcctcctacatggaagttgttcaggctgccaatactagtggaaactgggaagaactggtgaagt

SEQ ID NO: 1169 - DNA, 502 bp, Homo sapiens
  misc_feature 488: n = A,T,C or G
gaagttcttggagaggaaagataacactagcttgacctagagtagtagctctggaaatggcgtgatatttggaggtgactgacttttatggcgggcgggggtgtcaagtgtgaatcctaggtttctggcacagtgaagtgggttgtcatgctatttgttaagctcagaaactgtggcagagaatcaggttaggtcattttgagtttatcagaaaagagttgttcaatatgctgtcaccaaatactggatgtattggtcttaaactcagtgtgggaaggtctggactagagatacatatttgagcttcatcagcatacaataattatatttgaagccatagataagatttctgagggatagcaataagaaaagggccttgacttagccttgaataaatccagtatttatagatcagatagaatatgatagctaaaatgatagctaggcgagtatggtatcacagaagctaagcgaggagtgtgtttcanggagggggagagag

SEQ ID NO: 1170 - DNA, 422 bp, Homo sapiens
acaatctcagctcactgcacttcaacctctgaagtgcaagcaattctcccacctcagcctcccaagtagctgggactacaggcacaggccactatgactggctagttttcgtatttttattttatttttattttttgtagagacgaggtttcaccatgttgcccaggctattcaagcgatccacctgcctctgcctcccaaagtgctgggattacaggtgtgggcctgacattacgtgcccggcctgacactactttaatcaaactgttacacacctactatctatggaaatggatagtggtagtgaatggtcagaggttttagaggaccagctttttatgagaagagcaggcctggataagtcactgaacacggaaggtttagaccagcccaagagccctttgggggtgggaagagggcag

SEQ ID NO: 1171 - DNA, 539 bp, Homo sapiens
acacccatggaacaacttatatctttagtaaacaagtgcaacattattgtcagttattttgcatgtttaaatattatagtctgattatttgtaaacaaacaaaaccccaaatactctaaattctattttaaaaatctgtcaacccacaattattctaatatgctttacttactcgaacacaaatttctgaaaggtgcatatattaccttagataataaggtttagaaatgagtgcttcacactatgaaatgtgcatttccgataagtgatttatgcagcataaagtttagatcaagaaattacaaatcctggatccccacagttcatttagaaaatgcctcaaagttatggctcttgcagcaggtttaacagattaaacattaagtgttctagctccctctatttcaagtatcaaagaaatatgaggctcaaaatctctctaggttgtaactgataatgcaaagcattagaaaacagttaaatgtgttttgaaatacagtattaactgagattattaaggtgtttatctacgttagcgt

SEQ ID NO: 1172 - DNA, 416 bp, Homo sapiens
atttttagagcaatatttaatcaggtgaataccagcaaagagagaaaatacagaaaaagaaatttccataaggcatgatatgaataaataagtgaaaaaacaatctcgggtttaaaagtaaagcatgagaatttgaagcctgtgaaattttatttatacaaaagaataaaaagttatttaaaaagaactgatttaaacttatgtttttccatttttcctgttccttgaacatgaatctactaccaactcagaaagatttaagataggtaattactaaacactctttacctccccttgcaaaaaacagaggcaagtttcccattttacttatgataaaccagattattttcagttatgaatattggcaactgcatgaaagagatgatcagatatgtcagcaggaaagtatgagctgt

SEQ ID NO: 1173 - DNA, 485 bp, Homo sapiens
acctgccccgtatatatcagtaactcctgatgcaagtcctaatgtatttgaagagccagagagcaatatgaagtctatgccaccaagtttagaaaccagtcccataactgatactgatcttgcaaagagaactgtcttccaaagatcatactcagttgttgcttccgaatatgataaacaacactccattttacctgcacgagttaaagctattcctagaagaagagtttgctctgggatgtggagtgtgcagaaatgcccacactttttagaacacgcagatcctttgtctacagagagaaaaattgccttcatcccccaagaggatgcggtgaagtttaaactctgctcaggataaggacgggaccatttttacatccatgaaaatgaaccattcacagtgcaagaaggataccaaataccatgtgctttgaccaaaatgttaacagtgatatgaacaataaggtccaggcggaggtggtctc

SEQ ID NO: 1174 - DNA, 471 bp, Homo sapiens
  misc_feature 394: n = A,T,C or G
actttggataatgatcgccttggccttggctgtgattatcacctcttacaatatttggaacatggatcctggatatgatagcatcatttataggatgacaaaccagaagattcgaatggattgaatgttacctgtgccagaattagaaaagggggttggaaattggctgttttgttaaaatatatcttttagtgtgctttaaagtagatagtatactttacatttataaaaaaaaatcaaattttgttctttattttgtgtgtgcctgtgatgtttttctagagtgaattatagtattgacgtgaatcccactgtggtatagattccataatatgcttgaatattatgatatagccatttaataacattgatttcattctgtttaatgaatttnggaaatatgcactgaaagaaatgtaaaacatttagaatagctcgtgttatggaaaaaagtgcactgaatttattaga

SEQ ID NO: 1175 - DNA, 524 bp, Homo sapiens
acgagtgaacaaacggatataaaattcaagaaaaaaatgaaaatattttaaaaataaaaatctgaaccttttccttgaggtgtattgcgatatggttaccaacacattcagcaccttgtaatcaccaagttactgatttgagtcctggaacaagaccctaaaattaaagaacaagagatcctagtcatttgtgagtcacaggttggcagcagaagaaaaaccgacagcaactagaggagctcaaatacatgaaattcacacttctgaaatatttaatactcacttcaaacagctaattgtctatatgatttttaaaaaggaaacagcccatattccagactctgagacaatttattgttattttagagtatattcctattatattttaaaaatgttaactgtcaaacagcctcaggcagacccttcgtgagctatttgagaaagctttgtcattataggaagtgtcaagcttccatgcatgttattacccttgtgcactactcatctttgttcctgtgacctgt

SEQ ID NO: 1176 - DNA, 212 bp, Homo sapiens
  misc_feature 157, 201, 205: n = A,T,C or G
acatctatttgtgagagacctcttgaaattgtttaaatggttacatcaagagtttaatattcactaaactggcatcataaaattgtatgactttctccagccttgtctgatcatgctcgttgttgcccagctcagtaataagctttgcaggatccancctgttctgacctatccctactgagtccccatagcattttgttncctnctgtggc

SEQ ID NO: 1177 - DNA, 359 bp, Homo sapiens
  misc_feature 39, 72, 109, 114, 140, 141: n = A,T,C or G
caccacttccacacaggggcctcatggcatggtcagggncccagctgtgggtgagagcagggcactgtccanctgtccactggggaagtcaagatgtcctaaggcccangccanggcatctggagtctgaaggaccctanntcctagaagcatctggcagcaagaaggtgaggcatcagggaacgggaatcaggctgggactgatcagaggtgaagggacagagagaggagaggaggaagattgagctgggggcaacagccaagctcacctgggcaggtctctgccacctccttgctctgtgagctgtcagtctaggttattctctttttttgtggctatttttattgctttggatttg

SEQ ID NO: 1178 - DNA, 245 bp, Homo sapiens
  misc_feature 12, 55, 77, 164, 174, 215, 221, 234: n = A,T,C or G
ttttttctgtanagacagggattcactatgttgcccaggttggcctcgaactgcntgagctcaagcaatctgccctnctcggcctcccaaagtgctgggattacaggcactgagccaccaagcctggtctgcaatcagttttccttctaggtcttaagatcttnattattcttnttgtaaggggtgtggatagatatttatgagtggtagcggcnaacttnagaggaccagaantaatgattcct

SEQ ID NO: 1179 - DNA, 481 bp, Homo sapiens
  misc_feature 409: n = A,T,C or G
actgactgcaaatatccaggatcttaaggaagaatattctaggaagaaggaaactatttctactgctaataaagcgaatgcagagaggttgaaaaggctgcagaaatctgcagacttgtataaagatcgacttggactagaaattcgaaaaatttatggtgagaaattgcagtttattttcactaatattgaccctaagaatcctgagagcccatttatgttttccttacatctcaatgaagcaagggactatgaagtgtcagatagtgcccctcatcttgagggcctagcagaatttcaagagaatgtaaggaagaccaacaatttttcagcttttcttgccaatgttcggaaagcttttactgccacggtttataattaacatacaaatagtgtatataaaaacggnttatttttcttctctattacatatctcttttttttcttgtttttattattattatactttaagttttagggt

SEQ ID NO: 1180 - DNA, 330 bp, Homo sapiens
acccctgatcctcactaaagtccttaggaatgttgtctccagtcaactctgccacgatgttggggatgttgccaaaaggacccaaatgctgaagtccttcatgagctccaccttcaatgctctgggggcccacaagattcatggcctggtgagctggatattccactcggggcctggcaatgcccaattgctccataacaccatgaagcagcctctggatatctgcttctgagacccggtcaggggtccgggggctgtaagcaaatgctggggtccatccagatgccagccaaaacagtaggccagatagcatggtagagaccatcctgg

SEQ ID NO: 1181 - DNA, 222 bp, Homo sapiens
accttaatatctggcttcagatcttagacaggatcagagggccagctcaaatttgcaaggaggggaggtagatcccaccattttatgggtgaatggcaaaatcaaacagaaattatgtgggatgggagatactgatgcagccatctttggaaacattctacttagctaattttatgctaggctttaagtcaagaaggagagagagagctgacatgctgtggt

SEQ ID NO: 1182 - DNA, 113 bp, Homo sapiens
accactttgagctgagcaatggacgtggacaagaactccacttcctggtccagctggttcttgagcatttctagctgcggcagattcagctccgtgatgttaatagactgcgc

SEQ ID NO: 1183 - DNA, 272 bp, Homo sapiens
acaggcagatgaaaccaggtcactggggagtctgcttcatttcctctagctgttatcttgtgtatggatatgtgtaaatgttatgactccttgataaaaaatttattatgtccattattcaagaaagatatctatgactgtgtttaatagtatatctaatggctgtggcattgttgatgctcacatatgataaaaaagtgtcctataattctattgaaagtttttaatatttattgaattattttgttactgtctgtagtgttttgtggagt

SEQ ID NO: 1184 - DNA, 522 bp, Homo sapiens
  misc_feature 399: n = A,T,C or G
actaaagtcttcccttttggaggaaatatgtatgtcccaattacacacaatgtcaaacactccctactatcctcctagtagcgtcagttgccctttaccatcccatttgcacccttgtttatattttaaagaaatcgctcttctaatgtctctatcaaaaatgactgaacaaaagatcacccccctcacacacacaagacagtgtttcaagaaaagaagaaaacaccagaaccatcttatacatttatggcatctggatcctacaggcatttgcaattgcagtccttgaaacaaagagagagaagtccaacagtcagttgttaatggatactttataagctaagctataagaaacaagcaaagtaaaagcagcaaaacagggtaatcatcatattaatngcagaaaacaaaagtgaagatccacaaactgttgctgtgggtatataaatatcttaactaaactgggatacaacaggcctagtaaatttgtcttctcaggaattggaatcgagctattaaaag

SEQ ID NO: 1185 - DNA, 357 bp, Homo sapiens
actttatctaacatcttctctttcagtagtcttgttttttttatatcatgtgattgtttgtgtgtcccctttcctcttctttgcttaacacaattatcttgtgttaaggatctcaaagatttcatgagacaagctggggaagtaacgtttgcggatgcacaccgacctaaattaaatgaaggggtggttgagtttgcctcttatggtgacttaaagaatgctattgaaaaactttctggaaaggaaataaatgggagaaaaataaaattaatcgaaggcagcaaaaggcacagtaggtcaagaagcaggtctcgatcccggaccagaagttcctctaggtctcgtagccgatcccgt

SEQ ID NO: 1186 - DNA, 191 bp, Homo sapiens
actcaaagaggctctgggtggagtgccggatctgcaacacggagacacctcagaaggcagtgggacccccgagcctgccacccctcaggcttggctacagccggtcaagcatctgctgaagagcagaactgctccgagctgcagagacgcgaaggtctggccccaagcggctggtgcggacgccagcacgg

SEQ ID NO: 1187 - DNA, 241 bp, Homo sapiens
  misc_feature 198, 205: n = A,T,C or G
actgctgcagcgagccgggcagctacttcccctacaagcacagctacatgtggagcctcagcattggtgccttgattggactaggaattgctgcccttgttttactcgcctttgtcatcagtgtctgtgtcctttgctatttatttctgtctacgaaacctcaaagattagacactggccttaagcttcaacacttanaggcttnttccactcaagaaggcaagtcaaatggaaaaaccaa

SEQ ID NO: 1188 - DNA, 433 bp, Homo sapiens
acaattattaaaatatacctttttgaaaaataataagatgaccatttatacctaaataaggtttcccagaaagttatgaaatacttttagcatataaaagtagttgctccttttctgaaaagtcagctgttgtttcacaaaataactcatatgatccaaggcaaacgatttctttcaaatgccatattctctctatgactttgaggtatgcttcaagagactgtatccataagaacagggcacatttgggtattagaccacagttacaaacgcaaggagtctttcttgggtcaggaatgcccttaagagttatatcgacagagaacaaaagatagcttctgaagccatatcctttacaaatacatacaactaaatttggttatttagaggataattcaagacacagctattaaccacatgccgtgtcatgtgt

SEQ ID NO: 1189 - DNA, 186 bp, Homo sapiens
actcattcaagatcaacagccacgtctccttccccctcgaggggctcgacctgcgccccttccttgccaaggagtgcacatcccagatcaccacctacgacctcctctcggtcatctgccaccacggcacggcaggcagtgggcactacatcgcctactgccagaacgtgattaatgggcagtggt

SEQ ID NO: 1190 - DNA, 273 bp, Homo sapiens; identical to SEQ ID NO: 706

SEQ ID NO: 1191 - DNA, 479 bp, Homo sapiens
  misc_feature 447: n = A,T,C or G
acagaggcctacagtgtccttatgttctttgagaatagtcctctgaaattgaggtgttgatatgtataacctttcccacctaaggaattaatataaaacttagtcatgttacaattttaattacaaattcagcctggtgcagtggcttcctcctgtaatcacagcacattgaaaggctgaggtgggagcatcactcaagactatcatgaacaacatagggagaccctgtctctacaaaatataaataaattagctgggcatggtggcatgcgcctgcggtcccagtcactcaggaagctgaggtgggaagatcgcctgagtctgggaagttgaagctacagtgagccatgatcgcaccactgcaccccagcctgggtgatgagcgagaccccgtctcttaaaacaaaaacaccacaaattcacagtaagctgttcatggaaataatnaatgggactgattggcctacattgcatcctac

SEQ ID NO: 1192 - DNA, 406 bp, Homo sapiens
acccctgatcctcactaaagtccttaggaatgttgtctccagtcaactctgccacgatgttggggatgttgccaaaaggacccaaatgctgaagtccttcatgagctccaccttcaatgctctgggggcccacaagattcatggcctggtgagctggatattccactcggggcctggcaatgcccaattgctccataacaccatgaagcagcctctggatatctgcttctgagacccggtcaggggtccgggggctgtaagcaaatgctggagtccatccagatgccagccaaaacagtaggccagatagcatggtagagaccatcctggagaccattgtcaaccgaggggcagcccgaggagcctactgcggtatgggccttgtgggggtcaggccaggaacggg

SEQ ID NO: 1193 - DNA, 239 bp, Homo sapiens
  misc_feature 128: n = A,T,C or G
acacaggggccaacaaatatgatgaggcagccagctacatccagagtaagtttgaggacctgaataagcgcaaagacaccaaggagatctacacgcacttcacgtgcgccaccgacaccaagaacgtncagttcgtgtttgacgccgtcaccgatgtcatcatcaagaacaacctgaaggactgcggcctcttctgaggggcagcggggcctggcgggatgggccaccgccgactttgt

SEQ ID NO: 1194 - DNA, 449 bp, Homo sapiens
acgcaacatcaagagtatgtgggagaaagggaatgtgttttcatcccccactgcagcaggcacaccaaataaggaaactactggcttgaaggtaggggtttctagccgcatcaatgaatggctaactaaaaccccagatggaaacaagtcacctgctcccaaaccttctgacttgagaccaggagacgtatccagcaagcggaacctctgggaaaagcaatctgtggataaggtcacttcccccactaaggtttgagacagttccagaaagaacccaagctcaagacgcaggacgagctcagttgtagagggctaattcgctctgttttgtatttatgttgatttactaaattgggttcattatcttttatttttcaatatcccagtaaacccatgtatattatcactatatttaataatcacagtctagagatgttcatggtaaaagt

SEQ ID NO: 1195 - DNA, 136 bp, Homo sapiens
  misc_feature 35, 47, 49, 74, 84, 97, 107, 115: n = A,T,C or G
acaagcttttttttttttttttttttttttttttngtattttaatananatggggtttcatcatgttaggccanactggtctcnaactcctggcctnaagtgatccncccacctnggcctcccaaagtgctgggat

SEQ ID NO: 1196 - DNA, 418 bp, Homo sapiens
  misc_feature 104, 127, 209, 271, 351, 367, 375, 382: n = A,T,C or G
acaagctttttttttttttttttttttttttgaaaagtcatggaggccatggggttggcttgaaaccagctttggggggttcgattccttccttttttgtctanattttatgtatacgggttcttcnaatgtgtggtagggtggggggcatccatatagtcactccaggtttatggagggttcttctactattaggacttttcgcttcnaagcgaaggcttctcaaatcatgaaaattattaatattactgctgttagagaaatgaatgancctacagatgataggatgtttcatgtggtgtatgcatcggggtagtccgagtagcgtcggggcattccggataggccganaaagtgttgtgggaanaaagttanatttacnccgatgaatatgatagtgaaatggattttggcgtag

SEQ ID NO: 1197 - DNA, 455 bp, Homo sapiens
accaataccaccaattttgtagacatcctggagaggcaggcgcaagggcttgtcagttggacgagttggtggtaggatgcagtccagagcctcaagcagcgtggttccactggcattgccatccttacgggtgactttccatcccttgaaccaaggcatgttagcacttggctccagcatgttgtcaccattccaaccagaaattggcacaaatgctactgtgtcggggttgtagccaattttcttaatgtaagtgctgacttccttaacaatttcctcatatctcttctggctgtagggtggctcagtggaatccattttgttaacaccgacaattagttgtttcacacccagtgtgtaagccagaagggcatgctctcgggtctgcccattcttggagataccagcttcaaattcaccaacaccagcagcaacaatcaggacagcacagtcag

SEQ ID NO: 1198 - DNA, 287 bp, Homo sapiens
actttggggctcaaaagctaggatttctaagtcagtatgtgcatttcacacgataaagctgttaatggtgagcaaagtattatatactaactagatttttccacatctgtatagtatattatatgtattttgtggtattgagagtatagaaagtttagagtgtcaaacatgcgtttaatgtgtatttttaaacaaatttatggcaattaaaatatttggagacaagggtatcacatttcaatttgtaaagatctttttaactctactgtgtcattaagatgctttgt

SEQ ID NO: 1199 - DNA, 531 bp, Homo sapiens
gcttcttccactcaagaaggcaagtcaaatggaaaaaccaaagccctcaattcaaatgcagcatcaaatgcaacaaatgaaacatactatgaagctgatgatataattcaagaaaaaacaatggatgcaacacaaatccacattgcttattaactaaaaattctgtgttttaaatgcttactggagagatgggacaataaaaataaagcgtgcacttgaaacggtttgtaatattgcttttcaaaaattcgtcactcacaaagcaagacacagctgcatttttgatcattcagttactttattaaacgcacattaaggttttattggttttcctttgtataaatttatttgctaattaagatgtttctgtatcacatgagattatgctaattattcaggagaaattaaataatttatcaataacaagataagcagtcctatctcagtgaagaacagtgagaagtttatgtcacattaccagcatttctcaactttctgatacttacaggcagttattcttatgagatggta

SEQ ID NO: 1200 - DNA, 458 bp, Homo sapiens
acgggccgactcatttttgcaggggtttgtgaagaagtcgcaggaaccgtaggctttcgttgggtctatagttaacgccggatcgcagttggaaaccaccagctttttgtcagtatatattactcattttatagagccagaggccaagaagagtaagacggccgcaaagaaaaatgacaaagaggcagcaggagagggcccagccctgtatgaggaccccccagatcagaaaacctcacccagtggcaaacctgccacactcaagatctgctcttggaatgtggatgggcttcgagcctggattaagaagaaaggattagattgggtaaaggaagaagccccagatatactgtgccttcaagagaccaaatgttcagagaacaaactaccagctgaacttcaggagctgcctggactctctcatcaatactggtcagctccttcggacaaggaagggt

SEQ ID NO: 1201 - DNA, 252 bp, Homo sapiens
  misc_feature 155, 156, 164: n = A,T,C or G
actagctaaaccagaaaggtgattccaggaggagttagccaaacaacaacaaaaacaaaaaatgtgctgttcaagttttcagctttaagatatctttggataatgttatttctattttttatttttttcattagaagttaccaaattaagatggnnaagacctntgagaccaaaattttgtcccatctctaccccctcacaactgcttacagaatggatcatgtcccccttatgttgaggtgaccacttaat

SEQ ID NO: 1202 - DNA, 341 bp, Homo sapiens
agttgggctggtgagggaggtcaccagaggatgctcgggcactgaggtggcaagtctttgggctggtggggatgggcggaggtcgggccttgaccttgtgaagttgcagctgcctcagttctctcactcagggctcagagttatgcaccatgcccatccctgacctcatcttttatcttggagatgaagaccaactggcatagttctgttggtggactgagggctcttgactcctggaaatcatgagtccttctctgaaacactactcccgaagttgctttatctgggggagtattctggatgatggtgccatgtgaagaacccagagaagtgccactggt

SEQ ID NO: 1203 - DNA, 310 bp, Homo sapiens
actgcatcattttttgttaataggagaggagtgtttttattagaattgttctctctgaactgcctaagtaggaagcggaattgcaggaaaatggcagaggtagaagatgacaaacatgaggagggtttccccaggcgtccacattattatgttatcataggttacctaattactaactttatttctatgtattttaaagaaatataaggatgctgctttttcttttctttttttttcaaaagtcaccaaggcaaaaaaagttgcaagcaatcttggttactgagaatagaagtgtagtgaaatactaagt

SEQ ID NO: 1204 - DNA, 456 bp, Homo sapiens
  misc_feature 388: n = A,T,C or G
accctccttgacagcaggaactcagacttcaatcttgggggtctaagaccagaatattttccttctgccagaaaagaatcttgcacatatactcctgaaggcatgagtgtgtggtccatggtaagaaatagctaaaggctgctttccaggacccaaagccccatttaatgcaagaaccagagaagtgttctaggccattagtggacaatgtcatgtttggagaaagataacaacacaaataatgtaacctttccttaaaaggcagaactcaatccattttatttgatgcttattctaaccctaaccctgggtcacctggaatgaagaactctatgaataatatttgattttacaacgtgttatggttatgtgaaaactaaacatttgncttttataaagactgacaaaatataaatctttattctaaccctatccccaaaactagccaggccacac

SEQ ID NO: 1205 - DNA, 399 bp, Homo sapiens; identical to SEQ ID NO: 566

SEQ ID NO: 1206 - DNA, 456 bp, Homo sapiens
gaaagtcctgctttcctatctagcatttatttctctggcaaacttttctttcttttcttttttaaagtaaacttgtgtattgagtcttaactgtatttcagtattttccagccttatgtgttacattattccaatgatacccaacagtttatttttattatttttttaaacaaaatttcacagttctgtaatgtaggcacttttattttcattgtgatttatatataaggtaatgtagggttatatttgggagtgactgcaagcatttttccatctgtgtgcaactaactgactctgttattgatcccttctcctgccctttcccaggtaatttaaattggtcatggtagatttttttcatagatttgaaaaacttttaggttgttaccaagtatgaagtataaatctggggaagaggttttatttacattttagggtgggtaagaaagccacctt

SEQ ID NO: 1207 - DNA, 426 bp, Homo sapiens
accccacagtgcctgcgtcttgtaaactggggtgccacagcctggtggtgccacctatagtcgataatgtaaatcattcctcaggtattaaaaaggtgtgatttataaaaattattgtagaacaattccattgttatgcatcctccctgtgtctaaactgcctgataaacaatcttttactatacgagttatatcaattatatttaaataatgctactttattagctcactgtaaccattttggcaaacatctttatagcatttgtcatcaaaatgaaatatgttttgtaaaacttttgaagtctttaagaattagtaattaagaatatgcttttaaaaagagaactctagataccttaaagcaaaagtttgtagctatttttctttttaaatatttaatttgagaaaaaatgatgttacctttta

SEQ ID NO: 1208 - DNA, 516 bp, Homo sapiens
accttttcttcccatcaaaaatgcattaacaagatcatgtttatagttagtcagcacaagaaaaaaacgacaatttatactgaactatttaagtcttgcagtagagtgctcacaactccgagctgtatctgttaaccttttcaatagcattcattatgtgacattgtcaccaattacagtaaaagaacttcactaatttttgaaagctagaattactcaaaaaattctgcattgtaaataataccaggaatattgcatttaagcctaggatggcaaaattacttaaatcttttctatacttttttgtgtaatataggtaggaaaatgaatactatataagagaatgaaatatatcaagttcttatatttttacctaagaggctatttattttaaggaaagttgattaatatttaaatgattaaaaaataaatcaatgttaagtattaactgcacaaaatctaaaaaaaagaccacattacatcatactacattatatagatagatttaaagcagct

SEQ ID NO: 1209 - DNA, 364 bp, Homo sapiens
agggtagggggacagagggctttttaagattggtggtgggggatggggattaatacagacagctcgggtagggtccactcctggttccagggtgcaggttgctggacttggagcatgggatgaagagatgttcagagatagagatcattaggttgctgaactcccctagggcagtggagtgaaaaagctgtagcagccaaggcagggtgtagatccctggaggctgacggcttggggtggggccacagtgagcccagcccctgatggctctagttcttgtcccttgcagagctcagaaatggaggtggctcctgtgccttgtccagcaatggttccctgaaaagaacccataaggataccccca

SEQ ID NO: 1210 - DNA, 336 bp, Homo sapiens
  misc_feature 265: n = A,T,C or G
acccagaccctccaaatccctgtcctgttggaaaaacagcagatgatggatgtctagaaaacacccctgacactgcagagttcagtcgagagttccagttgcaccagcatctctttgatccggaacatgactatccaggcttgggcaagtggaacaagaaactcctttacgagaagatgaagggaggagagagacgaaagcggaggagtgtcaatccatatctacaaggacagagactggataatgttgttgcaaagaagtctgncccccatttttcagatgaggataaggatccagagtaaagagaagatgctagacgaaaacccacattacctg

SEQ ID NO: 1211 - DNA, 215 bp, Homo sapiens
accctgctctttgtgcatggtgcatgtcaagtcaggaagccaagaaaccgttggcattaaaatctagatgcatagagatccttgctatgagttgtggataggagtgactccatctatccttgtggtgaaagagtccaggagctcctttagagattgtcaagtcctgagcgatgagctgcccttaatcctcagaagccttacaaaaattgagatgt

SEQ ID NO: 1212 - DNA, 512 bp, Homo sapiens
acctacaaacttaaacagaattccagactgcaccatatagatgtggccctcttattttgtgcacctgcaagttcactgtattacttcacgatttgatcagactaattctccttttttccactaagacaaatacctcactgtccaaactaaattgacccttcataaatgtatgtaaactttctgtgtttcaatatcctagcatgataaatttagctagttctctctaggcttgcctatcaatgggagctcttagatcttcttccttcttgatttaattaacaatgtaaatttgggctaaaagtcaattaattaattttgccagtttgaaaaactcgactactgatttgcttactaattcatctatttcctttatgttttttattttgctccctttctaacttctttagatatcaaattccattgatttttttcctttcttatgaataaagccatttttgttggaaaatgccaaaaaaaatttaaaggatccaattaacataaatttgattaac

SEQ ID NO: 1213 - DNA, 305 bp, Homo sapiens
acgacgagtcgggcccctccatcgtccaccgcaaatgcttctaaacggactcagcagatgcgtagcatttgctgcatgggttaattgagaatagaaatttgcccctggcaaatgcacacacctcatgctagcctcacgaaactggaataagccttcgaaaagaaattgtccttgaagcttgtatctgatatcagcactggattgtagaacttgttgctgattttgaccttgtattgaagttaactgttccccttggtattaacgtgtcagggctgagtgttctgggatttctctagaggctggca

SEQ ID NO: 1214 - DNA, 285 bp, Homo sapiens
gcagagtgtgacagagcagagccagggccgggcgcaccaggagaggcgtttctggggctccagggaagtgccacgggaggcagaagtccagaactgcccatatagatgcccttctacatcctggagcccaaatcagtcatgtgggtgggaagttcccagggcagtggtcacatcgtgagaattagcaggaaaggcggggcctttcttgtcatagctatttctgaggatgaaatgggagacatatgcccagcacctgatgtaagtttatataatgtaatattatgt

SEQ ID NO: 1215 - DNA, 439 bp, Homo sapiens
gtcgctttgagcttctgacatgtcacttgccccgaggttaaaacttttcaccccctgaagaccttacatgttttatggtattggtgaggaaggaaatgttctcaaggtctcaggctatttgggaaattccaactcctataccttaccagagcatggaagagcccagatctgaatgtaaaacgtctctgttctgccagagatggaaaaaatacaggtatacttgtgatatagtcatggggcttcagtgtcactattttctccttaaagctccagccaaaaactggacaaggatagagaggaggagggaagaacaaaagagcccttctctatgaaccttgtgccttctgtcctaccagttttcttttacagattctcacttctgctagcctagccagggcttactccaggaatctaaatagatgccctagtccactttatc

SEQ ID NO: 1216 - DNA, 428 bp, Homo sapiens
acaaattcattgatgaacctcaatgatagcatatcagttagctgataaccctcattttatctggacccctgacttgtgggaataactaaaatacattgtggataacagataccacttttagaaaagaacctcttgcttaattaacatattccctttagccaccacagctggtcctgggctactacaggtgtgcattcatcgctcaatggtctactcagaaatgataaggttacagctttttttctttttttttttaaataaaaaagcaattgactgaagcattttctttttttaggtaaatagcaaaaataaaaataaaaaccaaccctggcatttgcacaaataatgcaaatggagtgatatggcctttaaggaaggagttagtagaaaggaagagggaagtgaagaaaatccagagaaaatgatgt

SEQ ID NO: 1217 - DNA, 425 bp, Homo sapiens
  misc_feature 89, 94, 110, 156, 157, 371, 417: n = A,T,C or G
gcactactcccataggctgggacatgacaactccatgatcctcaactttgtcatcaaagcttcccatgagagccttcctgataatgtcntccancccaagattactggcnggatcagcaaaagaatggcctctagagctaactgagcctgacgtannaactgctggcagattaaagatctcagttcctggctgagcagctgccatatcagagtcacctccaccagaggagttcaacttacgaaaaatctcctacttctttgatttaaccatgggtgatgtattttcaagcttggtgaagaatgaaggcaagtagcttatactccctggtgagcgggcatcattcctctgctctgcaggctctgcgcccctntgagacaagagcagcaagctgtcctgtttctcatgcacaaccggancctggggt

SEQ ID NO: 1218 - DNA, 446 bp, Homo sapiens
aaattttccgattttgacaatctaagagaatatccttgtttttaggacatacgtgaagtgtatttaggagtgagaggacacaatcatctgcaatttactctcaaatgattgagaaaaaactgtgtatataaaatgtgtgtggtgtgtgtgcatgtgagaaagagataattatgaaaggaatgagggtaaaatgtaaacagttggtgaatttgagtaaagggtatatgggaaaagttaccactccaaaaaaaagtaatcaatcatgttagttccctggttgcaactcatcaatgtcttcccatgacactaaaatgaaaactcctcattagggcctacaacatccctgaaatatgcagcctgcttatttttatttatctctttggcctcatctcctttcattctgttctttgatcacagccttccagccacacagattttctttctga

SEQ ID NO: 1219 - DNA, 181 bp, Homo sapiens
actaattgattcctccatccttgaatcagttctcataatgctttttaaataagaaaaattcagaagatgaatttcttccaatatttgaataaattaaagctcttagatacagagtagattgtattatatgctttttcctattaatactacttatagaaatccattaaaaagcaatctctgt

SEQ ID NO: 1220 - DNA, 205 bp, Homo sapiens
actgctgcagcgagccgggcagctacttcccctacaagcacagctacatgtggagcctcagcattggtgccttgattggactaggaattgctgcccttgttttactcgcctttgtcatcagtgtctgtgtcctttgctatttatttctgtatacgaaacctcaaagattagacactggcctctaagtgttgaagcttaaggccag

SEQ ID NO: 1221 - DNA, 442 bp, Homo sapiens
gccgccgccgcctcggccgaccagggacctgcccgcctgcggctgctccggacctagaggatcaagacataatgggagcatttttagacaagccaaagatggaaaagcataatgcccaggggcagggtaatgggttgcgatatgggctaagcagcatgcaaggctggcgtgttgaaatggaggatgcacatacggctgtgatcggtttgccaagtggacttgaatcgtggtcattctttgctgtgtatgatgggcatgctggttctcaggttgccaaatactgctgtgagcatttgttagatcacatcaccaataaccaggattttaaagggtctgcaggagcaccttctgtggaaaatgtaaagaatggaatcagaacaggttttctggagattgatgaacacatgagagttatgtcagagaagaaacatggtgcagatag

SEQ ID NO: 1222 - DNA, 243 bp, Homo sapiens
cgcctcttgcggcttttttccaggactgcatttcagagcaggaccttgacgagatgaacatcgagatcatccgcaacaccctctacaaggcctacctggagtccttctacaagttctgcaccctactgggcgggactacggctgatgccatgtgccccatcctggagtttgaagcagaccgccgcgccttcatcatcaccatcaattctttcggcacagagctgtccaaagaggaccgtgcca

SEQ ID NO: 1223 - DNA, 95 bp, Homo sapiens
  misc_feature 86: n = A,T,C or G
acagtcagaaggacaggacaatggggcggaagattctggggacacagaggatgagctgaggaggcacccccagggtggcagagcanaaggaacac

SEQ ID NO: 1224 - DNA, 449 bp, Homo sapiens
acctcggagatttatgtccaccgaagtggtcgaactgctcgagctaccaatgaaggcctcagtctgatactcattgggcctgaggatgtgatcaactttaagaagatttacaaaacgctcaagaaagatgaggatatcccactgttccccgtgcagacaaaatacatggatgtggtcaaggagcgaatccgtttagctcgacagattgagaaatctgagtatcggaacttccaggcttgcctgcacaactcttggattgagcaggcagcagctgccctggagattgagctggaagaagacatgtataagggaggaaaagctgaccagcaagaagaacgtcggagacaaaagcagatgaaggttctgaagaaggagctgcgccacctgctgtcccagccactgtttacggagagccagaaaaccaagtatcccactcagtctggcaagcc

SEQ ID NO: 1225 - DNA, 294 bp, Homo sapiens
tttcaccatttctaccccacgaccacctcggcttggctgtcttctccatgctgtgttgtttctggcccgttggcatcgctgccttctgtctagcccagaaggtcagtctgtgtgtgggacttggaggggactgggcaataaagagaaaaatgcaccacaaaaacaaagagccatatacctgaggcgggaaggtggaaggtagcccagagaacctgaactcaaatcctgagtctgccactctctgcaagattttttttgagtctcactttgtcgcccaggctggagtgcagtggt

SEQ ID NO: 1226 - DNA, 395 bp, Homo sapiens
actttgaagagtatgcaaaactggaaggccaggaggaggcaaataatatgtctttccgatggtgtctcccaagtgttggtgctttgggtttttataagttgtgaaaaggaagatgcacatttcttcattctccatggtgtgcatggaaatgtgtttgagtgtggatgtaaaagaaatcgagtaataaagaattagctggcttgtgaaatagtgcagtgttggatgcttcaagaggtataatcctattttattagcacaaacttgctagctaattagagtttatctttttagaaaggacaccgtataggttcgtaaaaaatatttacaggaagcaaaatagatctattactactttaccgactttaccccctttctttaatttgtataatttttgt

SEQ ID NO: 1227 - DNA, 449 bp, Homo sapiens
  misc_feature 137, 167, 288, 343, 344: n = A,T,C or G
accactgtcagctagaccagccagtaggccaccattttggtcactaagaagggaactgtgttgagtctgaaaggagtcagaaatgtaggatggaatgaacaagacagccatctgggttactcgggagagcacatggnttcttggggtagtcctgttgattaacaganattatactgggatatggaaaggaaagaacaagacaaattaggcctgccacagcacatggcagtcatcttagctgtcctaaaatcagcacagagcacaagggaagggagatcttgggaagtnccactgaagactgggaaaagtccttctcggtccacctctaacctcttacagtcannaagttccagcttcctcctgaaaggaagttcttcccgcccttcttctccacagaataagaaccatccacctcccacctcctgatccccagactaagccacttggag

SEQ ID NO: 1228 - DNA, 227 bp, Homo sapiens
acaacctcttttagaaagagctacatattttttaaaaaatctaggagggaagaacacttctcatttgataccaaactcaattgatacccaacttatttgataacttctcaactcaccttgataccaaaaccagacacagacactacaaaatttgaagttacagactggtatctctcaagaacatagacacaacaatccaaacaaaatattactaagtcaagctcagt

SEQ ID NO: 1229 - DNA, 530 bp, Homo sapiens
accaaagacaaatgcaactgatatggcaaactgccagtctaagtaaagttttgcacagcttacatgatactgtatgaatgtatgaaaaaaaaggagaaaaaaagaaaaaaaaaggtcagggttagggatcttactgaactgtgaattttatttctgtttgggtccaattatctacagaaggagcatccatacatacaaatattattttgctgttcctctagttcgcttccatagtagataagttggtggccatttagatgtcttttatttctgcacttattgtaggaaattttaatatatttcattttagtaagctattgataaaatagtttttgactttgaaaattaaaatgtttatttagcttattgtagtatacttccaccagacaacaaaatagattatttttattgtattatgtatatatatatatgtaaagaaagaaaaaagctaaaaatatctaattctttagttgccacttttccgattgatgtattattgtgcatgtaatattttcaagatcaacacaggc

SEQ ID NO: 1230 - DNA, 430 bp, Homo sapiens
actgagcgactccgccttgcagagtgacatagatcagcctgcttttcagcaactggtcaatttttcagaaggaggaccgggctctaattccactggcagtgaagtagcatcaatgtcctctcaacttccagatacacctaacagcatggtagccagtcctattgaggcatgaggaacattcattctgtattttttttccctgttggagaaagtgggaaattataatgtcgaactctgaaacaaaagtatttaacgacccagtcaatgaaaactgaatcaagaaatgaatgctccatgaaatgcacgaagtctgttttaatgacaaggtgatatggtagcaacactgtgaagacaatcatgggattttactagaattaaacaacaaacaaaacgcaaaacccagtatatgctattcaatgatcttagaagt

SEQ ID NO: 1231 - DNA, 419 bp, Homo sapiens
  misc_feature 387: n = A,T,C or G
gcgtgagccaccgcacccggctttttttttttttttaaacggagtctcactctgtcacccaggctggagtgcagtgatgcaatttcagctcactgcaccctccacctcccgagttcaagcctcccgggtagctgggattacaggcaccgccaccatgcctggctaatttttgcattttcagtagagatagggtttctccatgttggccaggctggtctcgaactcctgacctcaagtgatccacccacctcagcctcccaaagtgctgggattacaggcataagccaccatgcccggcccaaatgggctaatgttttaaacagatccttcttgtctgccctgtaggaggacaaattatcaggggcaggggtggaagctggagcccanaaaggaggggactgcaggtgggaagtgatggt

SEQ ID NO: 1232 - DNA, 460 bp, Homo sapiens
actgctctggagttgctggaagcccaagcagctactggctttatagtggatcctgttagcaacttgaggttaccagtggaggaagcctacaagagaggtctggtgggcattgagttcaaagagaagctcctgtctgcagaacgagctgtcactgggtataatgatcccgaaacaggaaacatcatctctttgttccaagccatgaataaggaactcatcgaaaagggccacggtattcgcttattagaagcacagatcgcaactggggggatcattgacccaaaggagagccatcgtttaccagttgacatagcatataagaggggctatttcaatgaggaactcagtgagattctctcagatccaagtgatgataccaaaggattttttgaccccaacactgaagaaaatcttacctatctgcaactaaaagaaagatgcattaaggatgaggaaacag

SEQ ID NO: 1233 - DNA, 335 bp, Homo sapiens
actacaggtggtatttatgcctaggcaagtatgggaaacaactgtgcagaaggataaagacgttcttatctatgactagaccatctgaatgatttggcctttgaaggtgactcaaggttgagcctggatgttggagacttggtgctatagaccaaggaagctgccaagtatttcgctggttcctaatctcatgaacatcagaatcacctgaaaaacatttaaagctacgaatgtctgaattcagcttcagagactctaaatcaataggagaaacttaaagcttcctagatgattctaataaccagccatgtttgaagaccagaccaccaatgcgt

SEQ ID NO: 1234 - DNA, 392 bp, Homo sapiens
actgcatcttactggatttaggacttctgagatgcttgtgaagtatagatgtggttgtggtcttagattgacagcattagagaagactggttagaacatctggtctcgctggttagtgcctcgttggctgaggactaggtgtgcatttctcctagcttttcatcaggaaatcccaaagtttccaaagctttttgtttacagaataaaacttcaaataaaaccaattcattatttgtccagaaggaagcttggctgagctggccttttaacataggaatgtatttcgttggaaacattctgaaaaatctcagagaactgaacccttacaaactttgttttccctcataaccaaagcttcaggttagaagtttagaaaaatagaatggttgggt

SEQ ID NO: 1235 - DNA, 417 bp, Homo sapiens
acgtgggccttcctcgagaccacccggagagttaccactccttcatgtggaacaacttcttcaagcacattgacatccacccagaaaacacccacattctggatgggaatgcagtcgacctacaggcagaatgtgatgcctttgaagagaagatcaaggctgcaggtgggatcgagctatttgttggaggcatcggccctgatggacacattgccttcaacgagccaggctccagtctggtgtccaggacccgtgtgaagacgctggccatggataccatcctggccaatgctaggttcttcgatggagaactcaccaaggtgcccaccatggccttgacggtgggggtgggcactgtcatggatgctagagaggtgatgatccttatcacaggtgctcacaaggcatttgctctgt

SEQ ID NO: 1236 - DNA, 470 bp, Homo sapiens
actatgaaattcaaaacaatgatattcgaatggaaatggcatttcatgaggcctccaaacagcttcaggcacggatgcttcaggcacaagtaacaaagcaaaagagcactggtgtagaagacactgaggaaagagggaagagagaatctagtttaggcccttggggaatcacaaatggttctgcaacagcaatcaaggtggaagccccagcagtatgtgcacagagtgcttgcacatgagctgttatgccctcaaggaggccccagctgtgaatattacttggtgctggcccaaacacacattcttaagaagaactttgccaaggcagaggaataccttcaacaagcagcccagatggactacctgaaccccaatgtctggggcctgaagggccatctctattttctgagtggaaatcattctgaggccaaggcatgctatgaacgaaccattagctttgtagtggatgc

SEQ ID NO: 1237 - DNA, 475 bp, Homo sapiens
  misc_feature 457: n = A,T,C or G
acacaggaagtttgtcagcaggatactgcaggctggaggtgggagctgcagctgggcctggattgtggcactaaccgtgggcatgtaaggctgaagcatgacagagagcaaggcagctatattcactgccaagccagtcactgttcctgcccgttgcctgtcagcctcactgcctttaatccgcttccagggctcattcacctgaatatattggttgccatgtcgagatatggtgaggatactgcgcaaggcatcccggatccgaaccttctcaagtagctggtgatagtgctggagctccagggtgacatgggccagcaggcgctgatcatcaggggtgagcaccatctcaggcacatagcccccaaagaacttagacacaaacatcccagctctgttgatgaagttgcccaggttgttaagcagctcagaattattcttcagcagcaggtccgtncaggagaagcaccgtcct

SEQ ID NO: 1238 - DNA, 476 bp, Homo sapiens
actcccacccctacagccagatcaccgtggaaaccgagtttgacaaccccatttacgagacaggggaaaccagagagtatgaggtttctatctaaagagagctacacttgagaaggggacttgtgaactcaaccacaatctcctcgagacattcatccagagaccatgtggcacttgattgaaaccccagaatgtcgactgtctcttgtttagactctttatcaaaggtttactgttttcttccctgtatttattatatttaaaagtgaaataggtgtgggtttggatgtttcgcggcctcagccaaattcatgttacagcctcaattctgaaggcaggtggaagacttgcaaaatggcaaaccgcggcagcaaaaacacaaaacagcagatggagtttctcccatcagcaatgccatgctaaggctgcattgaattgcatgcatctttgggaaccatgcccatgatgttttcagt

SEQ ID NO: 1239 - DNA, 231 bp, Homo sapiens; identical to SEQ ID NO: 772

SEQ ID NO: 1240 - DNA, 523 bp, Homo sapiens; identical to SEQ ID NO: 844

SEQ ID NO: 1241 - DNA, 558 bp, Homo sapiens
acatgtccaactacatgtaaattactatgttataattagagaattataggaagagaacaatagttaagcatttttcatattttcagtccaactttcttaattttgattctgaatgaaaatcttagtatggaaaattgatcaactcaacgtaaagagtaaaaataaaagtttacaaaatcaattttcattttttgagtaatttatttaaatttgtgaatctagaaaatgtgtgttatatatttatatacagggaataacaaaagttaagtgtttaattggaaagaaaactgtgactgataatatgttgtaattaccattttataatattactttccattgcaatgacttaaaatgaagaaataagaataggaataattatgctaacaaattcactttgttttctgtgccactaaatttctttaggatcaagaactctttcatattcagacattaaacaatattcaaataattttataaaatagacatacaagtttactcatattaaaaaaacaagttgattttcatttcctgtagaaaaaccaaaacagagcagatgtg

SEQ ID NO: 1242 - DNA, 311 bp, Homo sapiens
accatgggcgctgcgttggcatcttgcaaagtgaggcagagctcattgatgagtatgtctgtccacagtgccagtcaacagaggatgccatgacagtgctcacgccactaacagagaaggattgtgaggggttgaagagggtgctccgttccttacaggtgagacccctctgtgtgcagcatttcaaaatgaaatcagccagcataattttggaagcatttctaggatttcaagtttccaatcttagaatgattatttactgactcccagctagtctagtgaagtgcctaacaaactgcagtccttcacgt

SEQ ID NO: 1243 - DNA, 472 bp, Homo sapiens
actaaggttgttgtatcagttaagaagacaattttgatagaaaaaaataatcttcctaatgatttcagtaaaacacaccctactattctgaagcattataaattctcagctcagacaaacccacatttaaatgtaagaacaagaaaccttccttatttgggaattcaggatcctcgatttctaatttctcgcttcctcctgctgctctatcctcaatcacataggctgcttatagatagctcctcttagagagagagaaacaagtgttaagacaagtgcttaaagactaaatctcaatacctatgtttataggtaggtttgcctgtttgtgggaatctcgaacatctatctctctactaacaaaatagagcatgttatacaaaattctagttcaaaatcaaataaagatgacttagaaatgcataccattagtggctaatgcttattttaagctattttccaggacctatct

SEQ ID NO: 1244 - DNA, 252 bp, Homo sapiens; identical to SEQ ID NO: 754

SEQ ID NO: 1245 - DNA, 440 bp, Homo sapiens
acggagtgtgggcgaggctttacccggaaatcaaccctgagcacgcaccagaggacacactcaggggagaagccatttgtatgtgctgagtgtggacgaggctttaatgataagtccaccctcatttcacaccagaggacacattcaggggaaaagccttttatgtgcagggagtgtggcagaaggtttcggcagaagcctaacctgtttaggcacaagagggcacactcaggtgcctttgtgtgcagggagtgtgggcaaggcttttgtgctaagttaactctcattaaacaccagagagcacacgcaggggggaagcctcatgtgtgcagggagtgtgggcaaggctttagccggcagtcacacctcattagacaccagaggacacattcaggagagaagccttatatttgcagaaagtgtggacggggctttagtcg

SEQ ID NO: 1246 - DNA, 377 bp, Homo sapiens
actctcgcctcacctctgttttcactggtgagattaagttgggctggtgagggaggtcaccagaggatgctcgggcactgaggtggcaagtctttgggctggtggggatgggcggaggtcgggccttgaccttgtgaagttgcagctgcctcagttctctcactcagggctcagagttatgcaccatgcccatccctgacctcatcttttatcttggagatgaagaccaactggcatagttctgttggtggactgagggcttttgactcctggaaatcatgagtccttctctgaaacactactcccgaagttgctttatctgggggagtattctggatgatggtgccatgtgaagaacccagagaagtgccactggt

SEQ ID NO: 1247 - DNA, 474 bp, Homo sapiens
  misc_feature 211: n = A,T,C or G
acatactattctgcacttttccaccaaaagcagtggtgtgttatgcttgttatataaaaaaagttatatcctgtggcaggaaaaaccctttctctttcacttttactaaacaactggagaaaatgttcaagtctgtataaagttgcctataagctggaaagtgaacttgttcaatctccatttacattttagtgcattttttgacaattgncacatttttaacaaaagtaagaaaatgcatatagcactaaagagtgtttcatcaaatgcttaagggattaaaaaatatggagcagagaacaaaatcattgtgaatggatgaactgttgtaaaatgaaaaaagtccaggcaaagttgttacaagtcttttgtcactttgatgagtcacagaaaatgaactttggatacctgtccactttaagggttttttccttaatcttttgcatgtaaacatagtgctaacttcagtacctg

SEQ ID NO: 1248 - DNA, 479 bp, Homo sapiens
acaatgtagtgtatcatgaagaaagaaataatatgcagatgtattatgaaatgtgttttattttcaaatgtgtggtgttgacaatatattgatttatcaagatactaagggaaaattctaaatttaacaaaatgtgtatattttaataaatgcataaagctttattgtgtgcctttaaatttaaaaatgggtttataaagaaagtcagaaacaaaagtgtcttactataaaatatccatagtaatgtaaagcttttacacgagactaccaaaaaaaagaaagaaaagaaaaaggagccttcccatattttgttaaccttaaccagtatctgaagtctgttactttttttccattcttaaatggagatgaataagtgaatttcgccttaagtgtttcaattgtcctttgtagaaaagccagataaatgagttcactttgaattgcattattgtggaaaattcattttcagaataaacatt

SEQ ID NO: 1249 - DNA, 281 bp, Homo sapiens; identical to SEQ ID NO: 927

SEQ ID NO: 1250 - DNA, 285 bp, Homo sapiens
actcagaaacagaaacaacttttcattggtggagaagcttgtctatggggagaatatgtggatgcaactaacctcactccaagattatggcctcgggcaagtgctgttggtgagagactctggagttccaaagatgtcagagatatggatgacgcctatgacagactgacaaggcaccgctgcaggatggtcgaacgtggaatagctgcacaacctctttatgctggatattgtaaccatgagaacatgtaaaaaatggaggggaaaaaggccacagcaatctgt

SEQ ID NO: 1251 - DNA, 437 bp, Homo sapiens
attggccccaggccaaaatcataaacgctttcaattaactaataataattgctggcatgttgccattaaatattcttgtctcattatctctggttgctttatcaaacccataggtcactgaagcccacttttgagacaaagactatttctcccccaaaagtcaagggaaatataaaaaatgaaattagtgattaagaatagaagtcaattaatacaatcattttgttttaattatttaaagtccagttttttccctccagcaaacctgaaaatacactatcctccagctatcagaattatattgagatctactcacatttatgatgatgttcagagattctcattgggaaggaaaaggcacacgctgcggcggtcttgcatgattctgttgttgtggaaattcaatttgttcattgtgttttgggctctctgggtgg

SEQ ID NO: 1252 - DNA, 482 bp, Homo sapiens
  misc_feature 441: n = A,T,C or G
acttggcccgggtcacgcgtgggtcctctccgggctcgggagtagcatcctcaggagtagtgtagcgagcaaattctggaaagtagtcctcaatcttcgatttcccagcaaggactttctcagcgagcagatcttgcttgttgaggaacaggatcacagagatggtgcgcagccatctgttgttccagatgctcttgaagaggttcagagcctcctgcaggcggttggtctggttgtcctcccggatgaccatgttgtagctgctgctggccaccacgaagatgatggcagtcacatcgttgaagcactggatccacttgcggcgttcatcgcgctggccacccacgtcaaacatgtggaagttgactttgtccacctggaacttggtctcaaagattccagaagtcaggacacggcagcgaagcaggtcctgatcgctcngcacatagtcagcctgcttgatcacgtcgatcttgtccagg

SEQ ID NO: 1253 - DNA, 403 bp, Homo sapiens
cttaactctgatggttcttcacctcctgccagcaaccccaaacccaagtgccttcagaggataaatatcaatggaactcagagatgaacatctaacccactagaggaaaccagtttggtgatatatgagactttatgtggagtgaaaattgggcatgccattacattgctttttcttgtttgtttaaaaagaatgacgtttacatataaaatgtaattacttattgtatttatgtgtatatggagttgaagggaatactgtgcataagccattatgataaattaagcatgaaaaatattgctgaactacttttggtgcttaaagttgtcactattcttgaattagagttgctctacaatgacacacaaatcccgctaaataaattataaacaagggtcaattc

SEQ ID NO: 1254 - DNA, 453 bp, Homo sapiens
  misc_feature 390, 414: n = A,T,C or G
accctaagggtgccatcttcctgttctttgcagggaggattgaagtcattaaaggcaacattgatgcagccatccggcgtttcgaggagtgctgtgaggcccagcagcactggaagcagttccaccacatgtgctactgggagctgatgtggtgcttcacctacaagggccagtggaagatgtcctacttctacgccgacctgctcagcaaggagaactgctggtccaaggccacctacatttacatgaaggccgcctacctcagcatgtttgggaaggaggaccacaagccgttcggggacgacgaagtggaattatttcgagctgtgccaggcctgaagctcaagattgctgggaaatctctacccacagagaagtttgccatccggnagtcccggcgctacttctcctccnaccctatctcgctgccagtgcctgctctggaaatgatgt

SEQ ID NO: 1255 - DNA, 504 bp, Homo sapiens
accaagatcaccccaccacactccagcctgggtgacagaatgagactgtctcaaaaaaaaataaaaagctcttaagtggcaaatttttctggtcatagttgattttatgttatttatgtgtagtaaacatattactatgaaacttttgaaaaaaattattgaatacccttagtgtatcatttttcatgtaggtttgtttcaaagataaatcaagttagtctgttatccttcaattacatgaaggaaaataataaccaaatagcataaaataatgtttagcataattaggggaattaatttatctaaatttatctaattatctaatttatctaattattaaaattacctactggcaaatattgctaaatagcatcagctttaaaatctgccactgaggctacaaaataccttttgcctgatttaaaagctctacgatggtgaagtataatctacatattctttttttagccctcaatatacatttaaaatgaactaagaaatcac

SEQ ID NO: 1256 - DNA, 402 bp, Homo sapiens
accttgcagctgacagataataggcaggacatgttagttataaagtagttacagcctaattcacaaaagttgccaactgtttctctttctagaaagaagcaagaagttaagaaattccttgaattagcgcctggtgtgtcaggtgggagtgcagaggagggctgttagagcagtgtcaaaaggaccctggtgggccagacgggttggacatcgttaataatcatagttggcttctaaatactggtagcaagatgacttctgatttgtaatcttaggtaaattatagataaatgaaaaaggccagtaatcatacactaagattaataaacagcacttcaaaattaaccgcataagggctgtgcttgcagcaaggtttcacaagacaaggcacccagatttttt

SEQ ID NO: 1257 - DNA, 391 bp, Homo sapiens
  misc_feature 49: n = A,T,C or G
caccaccccaatcccatgttttcctgttaccctaaaacagtggaaggcnactgggtgtttggtagacttctaaatcatggtctctgacaatttgaatctgagattctcacctccatttactaaagaatcgtgacttaattcaaattgcacagtaatcagtaaagtgaatacgtttttaaaatggaattttctcccttcagcaagcactcattaaggagtgaggctgagtattttaagatagagtgagatctgtgagtgattgaaaggtgatatttaaaaacttggatttcattccagtgtcaggtttgggttttaagttcctttggtccagggaagggtccaagcagccacagttgccctaaatctccatcattaagtcttacagcaaggt

SEQ ID NO: 1258 - DNA, 411 bp, Homo sapiens
acggtagaactgctattattcatcctatgtgggtaattgaggagtatgctaagattttgcgtagctgggtttggtttaatccacctcaactgcctgctatgatggataagattgagagagtgaggagaaggcttacgtttagtgagggagagatttggtatatgattgagatgggggctagtttttgtcatgtgagaagaagcaggccggatgtcagaggggtgccttgggtaacctctgggacccagaagtgaaagggggctattcctagttttattgctatagccattatgattattaatgatgagtattgattggtagtattggttatggttcattgtccggagagtatattgttgaagaggatagctattagaaggattatggatgcggttgcttgcgtgaggaagt

SEQ ID NO: 1259 - DNA, 315 bp, Homo sapiens
accatgtgtgcattgtatggagaaaataaccgagccagggagtatcactgcttcttatgtcttccaaggcagcagatatacctcagaatctgcacgaggcaggaaagcaggaaaactcagacgaaggcaccagcccaatctgcctcactggctcaagctgtatggtttatcacaaccattagcaaatttccgagaaccttgagtattgcaaagataaaacttagagatgtgcggaaggtcatggcagtagggtaggttggaggattgaatgtgctggtcaagaaccatgatacgggtaattaagggtcaccttgt

SEQ ID NO: 1260 - DNA, 468 bp, Homo sapiens
  misc_feature 457: n = A,T,C or G
acttcgtgtgctccgacccgtggtgacgatgacacaccctggtggcatgcccgtgtatgttggtttagcgttgtctgcattgttctagagtgaaacaggtgtcaggctgtcactgttcacacaaatttttaataagaaacatttaccaagggagcatctttggactctctgtttttaaaaccttctgaaccatgacttggagccggcagagtaggctgtggctgtggacttcagcacaaccatcaacattgctgttcaaagaaattacagtttacgtccattccaagttgtaaatgctagtcttttttttttttccaataaaaagaccattaacttaaagtggtgttaaatgcttttttccccccaagtagaactaatgctagcttccagcttgaaagtaaaactccagtgtggagtgaattttgtgtctaattataaacctgtaaccaaaactcanacatctggtac

SEQ ID NO: 1261 - DNA, 316 bp, Homo sapiens
actaaatgtcccaaagagtaagaaattagaactacctgttgtccgaagaccttaagcccaaagctatctgtgaaagtcctatagggattttgtaattctgtgtgtgcagaacacagttaaattattattattattatttttgagacggagttttgctcttattgcccaggctggagtgcaatggtgtgatctcgactcactgcaacctctgcctcccgggttcaagcgattctcctgcctcagcctccctaatagctgggattacaggcatgcaacaccacacctggctaatttgtatttttagtagagatggggt

SEQ ID NO: 1262 - DNA, 371 bp, Homo sapiens
ccaccttggtcttagagttgatggtctgcagggaatttccaggttaaaggttttttatttgtttgtttaattttgagacggagtcttgctctgtcacccaggttggagtgcagcggcacgatcttggctcactgcagcctccgcctcctgggttcagacagttttcctgcctcagcctcctgggtggctgggattgcaggcacgcaccaccatgcccagctaacttttgtgtttttggtggagacagggtttcaccgtgttgaccaggctggtctcgaactcctgatctggagtgatccggccaccttggcctcccaaagtgctgggattacaggtgtgagccactgcgcctgacctccaggtttaagttt

SEQ ID NO: 1263 - DNA, 340 bp, Homo sapiens
cggctatgtcctatcacaatttgcatgctggagaatctggtaaaagcaccattgtgaagcagatgaggatcctgcatgttaatgggtttaatggagaaatataatatccctagatgatggctacagtttctcatcttcccggctatgtcctatcacaatttgcatgctggaattgctcggtcttaggaacttctaataagaatactattctgttatctgaggggggaggggggatggggcccctgctacctgaccttaaacgatgattgaaaaaaacgaaaaatggactgaaatccttaattggcagaaatgtagtatgacaactatccaaaaaggcatc

SEQ ID NO: 1264 - DNA, 228 bp, Homo sapiens
  misc_feature 130: n = A,T,C or G
actggatacgggccttgtaggtgttcactcccattgtggtggtgtaacggaagtcaccattaggcaggtttcggggctgcccacagtccttgatcttgcatctgggcatggcacgatgccacgtgccatnatcctggcagacagctgtgaaggaatgcaacacctggttcccctctatgagctggtagccttgcttgcaggtagcaatgaagtagtcacggaactggt

SEQ ID NO: 1265 - DNA, 449 bp, Homo sapiens
  misc_feature 440: n = A,T,C or G
actcaagtcaattataaaatttatatcttttgccttttacttgaagaaatcatgctatagaaatggttaatgtgcttctaataaatggaagtattgtagctggaatgtgatacatgtaacagtttaagttcccattgaaggtataaaatgatgaattgttgtaagacttagacactgagtctcagtctggagctgatgaagatgttgagataacagccagctttatctcaacagggtttgtgacccacaagtttgggccacagagaaaattgaagcaatttgcatgttatgacaacctcagtgggaagtgaaaatcagctgactcaaaacaacaaacaacaaccaaccagacccaagtcacagttgcacctattcaaaactagctttaaagtgagctatttttaaacttcataaaaatattcatgattttattagtttgnatatttcta

SEQ ID NO: 1266 - DNA, 463 bp, Homo sapiens
ggaatttaaaagagatatagcagcactttaagggcaaaacactcttctatgtgaaaagtttattcagaagagtgccagggaagtgacaatgcagaaaggctaaactggggagcactgcagaaagacaggaaaaaggaatctggagtagaaaatctctgtctaaggggaacagctgaagcagacttggaagttagaaaaaaattacccctatgacctgatcatatttattggttgtgaggaagtaattttgtgaaggtggcagggacacagcatatttcatgttctagaaaactggtttttgagattatgaatactttgctgtttatctttcattaagatggataaatgaagcagagacatgagcttttcctgcaacttcatagtaatccagtggctgagtagggaacagaatgcaaatttggtatatgatgttaacttatttttgctattctgctatttgcta

SEQ ID NO: 1267 - DNA, 140 bp, Homo sapiens
  misc_feature 35: n = A,T,C or G
acagctcttaacattttattaagccatttgtgtancccaccacgtttctttgtggtgcttgtcctgtgtggaagattgtaaatcttgggcctgttgcatacttccaagggctttaaagcaatgtgattaacagtacctcg

SEQ ID NO: 1268 - DNA, 477 bp, Homo sapiens
  misc_feature 194: n = A,T,C or G
acaagggtagacctctggcttaccacatacactatgctaaagtcatcagccactgctactacatcttgccagaaggtttccctcgccaacaaacagttgaaatttaagggaagaagcaaaagctaaactgtctttgaccctaagatagatagaaagctatttatttgtcttcagtgttcaaggcatgactagtncttctaattagcctaataaattcccacactttctgaagtgaacactaatggtattgtcctactaaaactgtcattgtttctttttttttaactggtcagtcattcacaataagctatgagggtaaataaatatgtgttataacaagtaaaccgtagttgcaagaatataccatgaagattaaagtaggctgggtttcatttccatcttcccacacatcttcattgaatttgatggttgacttaattggcaccataactttgtatgatattatacattaacctt

SEQ ID NO: 1269 - DNA, 500 bp, Homo sapiens
acttaacaggctaacgtagataaacaccttaataatctcagttaatactgtatttcaaaacacatttaactgttttctaatgctttgcattatcagttacaacctagagagattttgagcctcatatttctttgatacttgaaatagagggagctagaacacttaatgtttaatctgttaaacctgctgcaagagccataactttgaggcattttctaaatgaactgtggggatccaggatttgtaatttcttgatctaaactttatgctgcataaatcacttatcggaaatgcacatttcatagtgtgaagcactcatttctaaaccttattatctaaggtaatatatgcacctttcagaaatttgtgttcgagtaagtaaagcatattagaataattgtgggttgacagatttttaaaatagaatttagagtatttggggttttgtttgtttacaaataatcagactataatatttaaacatgcaaaataactgacaa

SEQ ID NO: 1270 - DNA, 220 bp, Homo sapiens
tgcagattaggtgagctttcaatctctctttaaaaggggcggcgaagaggacccgcaggctgcaaggagcaacagcgatgggtaggcacattcaaaaccagaaaaaattgttaacaaaccaaacaaacatgaagatcatactgggaaactgaggccagggacccgggaagaaaataaaaatcatttaaaggaccatcagccatattggcatacatttgtg

SEQ ID NO: 1271 - DNA, 379 bp, Homo sapiens
  misc_feature 48, 356: n = A,T,C or G
aatcattacatatatggctattgctttttcatgcacaaagggcttggntaaagaccaactggggcggcaggggcggactcagggctttgcagggctccctgaggtctgatgggttacaagcaggtcctgaggtcaggtgtggggcttacctggcttcaatctggggtgtggttgagtgccccggccagggttcaaatcccaactctgccacttgctgactgattctggggaggagggttcctttccctttcggtgcctcagtttccctctctgtcaaatggggaaaacaatagcacccatctctggggctcttacaaagattaagttcactgcattattacatagaaagcatttanaacagtgcagccacatagtaagt

SEQ ID NO: 1272 - DNA, 403 bp, Homo sapiens
acaggaaggggggtcatgtctcagtagaccacctcatacacggtggccttcttgtcccccgagcctgtcacgatgtatttgttatttctggagatgtcacaactcaggactgaggacgactccttggactgccaagggaagggagagagaaaagggcacagtgaggcatggtccccacagatgggtgtgggggcaaggctggggcggagtcaggaacgggaggtcgggactcgcctacagagtgacgtgtttctttttttgagatggagttttgttcttgtcgcccgggctgaagtgcagtggtgcgatcttggctcactgcaacctccacctcccgggttcaagacactcccctgcctcagcctcccaaatagctgggattataggcgcccgcaaccacgcc

SEQ ID NO: 1273 - DNA, 312 bp, Homo sapiens
acggccagggctattggttgaatgagtaggctgatggtttcgataataactagtatggggataaggggtgtaggtgtgccttgtggtaagaagtgggctagggcatttttaatcttagagcgaaagcctataatcactgcgcccgctcataaggggatggccatggctaggtttatagatagttgggtggttggtgtaaatgagtgaggcaggagtccgaggaggttagttgtggcaataaaaatgattaaggatactagtataagagatcaggttcgtcctttagtgttgtgtatggctatcatttgtttt

SEQ ID NO: 1274 - DNA, 455 bp, Homo sapiens
cttgattctcagtctatttatcagctgattgaaatctcaaggaatttacagatacccccagaagacttaattgagatgctcaaaactggggagaagccgaatggatcagtggaaccggagcgggagcttgaccttcctgttgacctagatgacatctcagaggctgacttagaccatccagacctgttccaaaataggatgctctccaagagtggctaccctaaaacacctggtcgtgctgggactgaggccctaccagacgggctcagtgttgaggatattttaaatcttttagggatggagagtgcagcaaatcagaaaacgtcgtattttcccaatccatataaccaggagaaagttctgccaaggctcccttatggtgctggaagatctagatcgaaccagcttcccaaagctgcctggattccacatgttgaaacagacagatggcatat

SEQ ID NO: 1275 - DNA, 533 bp, Homo sapiens
acatgtccaactacatgtaaattactatgttataattagagaattataggaagagagcaatagttaagcatttttcatattttcagtccaactttcttaattttgattctgaatgaaaatcttagtatggaaaattgatcaactcaacgtaaagagtaaaaataaaagtttacaaaatcaattttcattttttgagtaatttatttaaatttgtgaatctagaaaatgtgtgttatatatttatatacagggaataacaaaagttaagtgtttaattggaaagaaaactgtgactgataatatgttgtaattaccattttataatattactttccattgcaatgacttaaaatgaagaaataagaataggaataattatgctaacaaattcactttgttttctgtgccactaaatttctttaggatcaagaactctttcatattcagacattaaacaatattcaaataattttataaaatagacatacaagtttactcatattaaaaaaacaagttgattttcatttcctgta

SEQ ID NO: 1276 - DNA, 473 bp, Homo sapiens
acatagggatttctcaggccacactgaggcttgtgacaggcagtgaataatccaaggccatggttcttatgtgaggttatattttacaaaattttgactcacatgtaaccttaggggggagaaaaattatatttcagccacagtgttctcaactcagccctttgataaaataatttctcagcttgttcactgtccttttgaaatgaatctgagttactcttatgataaaattgcatcaaataattacaaaccaaactgaaatgaccagatacttttatatgcaggacaaccatttgcacatgacagaattaataaatacaaactggaggacatttttttagtatctttggatttaaagaaaaattgatttccccaacctgaagataaatggataaattttcacaaggcaaggcatacttttcgtttttaaatcttaatcacattaactttttgtgacatgttccaatgagatt

SEQ ID NO: 1277 - DNA, 430 bp, Homo sapiens
aagaaactccaagggtttgagtaaatacaaagactgaagaaatttcacagcagtttattaatgtatataaacttataaatatttctccagcaaatttgaggaagcatgatatatttgaattaacaccaagggtgatatttcttttagagatgttagttaatctgttttgtgtcttacgtgaaatttcactgtagactgttttaaattgccaagactgcacaaaattacagtgctaatgtatatggttgcagttcacataaagacaaaagcatctgttatgaaatgagtagtaatattgggtggttgatttgttcttagcagacttggcttcattttggtcttgagataaaatggccagcataaatgctgtttatattcacgttttcctaggtgtgtgtgtgcaggccacagcagcatgcccttggtgtag

SEQ ID NO: 1278 - DNA, 464 bp, Homo sapiens
tgctcctctgggttgaaacccgggcgccgccaagatgccggcttaccactcttctctcatggatcctgataccaaactcatcggaaacatggcactgttgcctatcagaagtcaattcaaaggacctgcccccagagagacaaaagatacagatattgtggatgaagccatctattacttcaaggccaatgtcttcttcaaaaactatgaaattaagaatgaagctgataggaccttgatatatataactctctacatttctgaatgtctgaagaaactgcaaaagtgcaattccaaaagccaaggtgagaaagaaatgtatacgctgggaatcactaattttcccattcctggagagcctggttttccacttaacgcaatttatgccaaacctgcaaacaaacaggaagatgaagtgatgagagcctatttacaacagctaaggcaagagactggactgagac

SEQ ID NO: 1279 - DNA, 220 bp, Homo sapiens
accagctgcaagaaaacctgtaagagattttttaaaatttagattagcacaccttactaatctgacagaacctggattctcttgatattggaagaagatgagagtggataccggggaagtcactagaagtatctgtcactcttggctggacagcaggctgcaaacatattaccacttgatggaggcatcatgctctggtcgcaatccgcgtgcatcaggt

SEQ ID NO: 1280 - DNA, 143 bp, Homo sapiens
acaacctcttgcggagcggggaaggtgactaccgaacaagacatgctgcctgccctgtgcttgtgggctgcaagtgggtctccaataagtggttccatgaacgaggacaggagttcttgagaccttgtggatcaacagaagtt

SEQ ID NO: 1281 - DNA, 384 bp, Homo sapiens
acagaggaaggtgatgttctcgcatgcgcagataaaaaaggacaggtcagtctaaatcattcttatagaggaatgagaagttaagagaaggacaaggaagcactgtgagaaaacatcagggctgagagagacatttgggaaattaaagtttaaaaatccactgccatttcatccagcagagtgcaacacattcacaagtgcaaggaatactgggtagtttggtttaaaacaaaaacaaaaacacctcccatacaagggccaatttttcaccccatccccaacctctaatttttcaaaaaggttgtttactgctatacaatcccagaaacacatcaaccaggctcagtatttaaaagtcccaacccacttagacaataaaaaaat

SEQ ID NO: 1282 - DNA, 352 bp, Homo sapiens
  misc_feature 114, 188, 191, 216, 267, 270, 302, 314: n = A,T,C or G
acaagctttttttttttttttttttttttttttttttttttttattcggttcagtctaatcctttttgtagtcactcataggccaaacttagggctaggatgatgattaataanagggatgacataactattagtggcaggttagttgtttgtagggctcatggtaggggtaaaaggagggcaatttntanatcaaataataagaaggtaatagcnactaaaaaaaattttatggaaaaagggacccgggcgggggatatagggtcnaanccgcactcgtaaggggggatttttctatgtanccgttgagttgnggtagtcaaaatgtaataattattagtagtaaggctag

SEQ ID NO: 1283 - DNA, 308 bp, Homo sapiens
atagagtcactgcaccactgcccaggtctcccggctggatgaagacgtggtccatgaggaagctggctagctcagactggagagtagcttcaggaaaaaagacaagtggcctaaggaaatcacggcccccaacaatcatctgagggctaaagatgagaagtagatcacttaataagacaaaagcctgtagggggaaaagaaaggatgtttaaaaggacagaatgtttcccaaggtagaaatgacactgtcaatttctccttggaatgggggcagggatactcgccttgttgctcccacttgagtcagt

SEQ ID NO: 1284 - DNA, 526 bp, Homo sapiens
acttttagtagagatggggtttcaccatgttggccagactggtctcaaacttgtgaccttgagtgatccacctgcctcggcctcccaaagtgctgggattacaggcaagagccactatgcctggacctttattttatgtaatagatgttttatgatgtgaaaataggttgatatcttaaaaataggttttcctttctattccaattttgatatgaatgcatttctttgtattgtttttttctcaaataaatgaatcaagaaaccaagacaattggtccaatttgacgtttttcatttgatttaaaaaatgcagaaattaatatactgagtcccttttaagacagaggcctgctcgttaatgtaaaagcttggaaaagttatacaaagaacactctgaaaataaagtttttgttattaacacaaatgattttgtaagaagcaaaacattttttttcaaaagcaggatttgttctaagtctaggttcacaaaggtattcatttctataatatcaacttaagactgtga

SEQ ID NO: 1285 - DNA, 225 bp, Homo sapiens
  misc_feature 167, 222: n = A,T,C or G
actcttctttgtcagtatatcaacctacagctcctgaatgcaaagccacaagagtgtttaatggggacagtgggcactctcctgcttgaaaacccacttgggcagaatggactcattcaccaaggtcttctgtatgaagcagccaaggtgtttggccttcggagcangaagctaaagctgtttctgaatgagacccaaacgcaggaaattacagaagacatnccc

SEQ ID NO: 1286 - DNA, 471 bp, Homo sapiens
  misc_feature 450: n = A,T,C or G
acccagaccctccaaatccctgtcctgttggaaaaacagcagatgatggatgtctagaaaacacccctgacactgcagagttcagtcgagagttccagttgcaccagcatctctttgatccggaacatgactatccaggcttgggcaagtggaacaagaaactcctttacgagaagatgaagggaggagagagacgaaagcggaggagtgtcaatccatatctacaaggacagagactggataatgttgttgcaaagaagtctgtcccccatttttcagatgaggataaggatccagagtaaagaggagatgctagacgaaaacccacattacctgttaggcctcagcatggcttatgtgcacgtgtaaatggagtccctgtgaatgacagcatgtttcttacatagataattatggatacaaagcagctgtatgtagatagtgtattgncttcacaccgatgattctgct

SEQ ID NO: 1287 - DNA, 477 bp, Homo sapiens
  misc_feature 420, 468: n = A,T,C or G
acttttcttgtattttttaccatatcactgtaaagaagaggggaaacccagccagctactttttttcatcactttttattcataacttcagatttgtaaaactaatttccaaaatataagctgttttcattagccagttctataatatcttcctgtgatttatgtagaaaatgaacacaccccttttccatttaagaccctgctactgtgtgaagagatgatacttacaaggagtgtcattacctgtgagctgactgaatgttggtaggtgctccattacaatccaggaaagtctgtgttactgatatttgtgtggaaatctttatttcacttcaatttaaccattagatggtaaaattaagatgctacttgttggtaaaaattggtggactggtttcaatgggtaaatgtgttgtggcnaattaatgtgttggaatattgctctttgtgaatttgtgcttaagtcantgaatgtgt

SEQ ID NO: 1288 - DNA, 389 bp, Homo sapiens
  misc_feature 279, 332: n = A,T,C or G
actagatgtcctgctaaacccttgaaccctactaataccttggcctgcacgtctctctcactctgttctgcaagtcaatataagtattaacattcgtgataaataaaaattctctgcatgtttcagcaaaaaaaaaaaaaaaaaaaaaaaaagcttgaccattggtggccaattgatttgatggtaagggagggatcgttgacctcgtctgttatgtaaaggatgcgtagggatgggagggcgatgaggactaggatgatggcgggcaggatagttcanacggtttctatttcctgagcgtctgagatgttagtattagttagttttgttgngagtgttaggaaaagggcatacaggactaggaagcagataaggaaaatgattatgag

SEQ ID NO: 1289 - DNA, 475 bp, Homo sapiens
acctccaggccaggggtgtctcctgttcccatgcttcgggtcactgggcgagttctggtggtggggctagcagcctctggctcaggacggtcaacaggactggaagagtcccagctccgagttcgagagacaatgggaccagggctcttttcagcctgctctgagcctggggagaaagtggcatcctggctccgggtcatcatcctccgaggagattcaggcaccagaggtaagcgctctggtcgcccctcaaggcctgggattggggagctggtcaggccaaaggatgcatccaggtcagtcatggacgattcaatctgctggaagccccagagccccaccttcctcatacattgcgaacatgttatcagggagagctgcatggattccaaagaggaactacacgcccagccacacacagagagaatacaggcagtgacgtggacttggatgtctgagcctaatttgattgtag

SEQ ID NO: 1290 - DNA, 290 bp, Homo sapiens
gcaggtcaagaaactcctttacgagaagatgaagggaggagagagacgaaagcggaggagtgtcaatccatatctacaaggacagagactggataatgttgttgcaaagaagtctgtcccccatttttcagatgaggataaggatccagagtaaagagaagatgctagacgaaaacccacattacctgttaggtctcagcatggcttatgtgcacgtgtaaatggagtccctgtgaatgacagcatgtttcttacatagataattatggatacaaagcagctgtatgtag

SEQ ID NO: 1291 - DNA, 298 bp, Homo sapiens
actgtcgcgtgccattgctgagctgggcatctatccagctgtggatcctctagactccacctctcgtatcatggatcccaacattgttggcagtgagcattacgatgttgcccgtggggtgcaaaagatcctgcaggtgagtatattactatgtgggatcagtgtccggaaagtcaaaaagagggcctgtggggactatatgaggactggatctttctttgtgatttgttttggagcaaggaaagttgaggctggcaattgctagtgagagctaatgaggtctcttgagtttccaggt

SEQ ID NO: 1292 - DNA, 219 bp, Homo sapiens
acgttgtgggtggagaaatgttggcatggaagagaggagaaaaggtatgaaatgaggaaagtgttatttgccacaggaaatattggattcagttgatttttaaaaatgaggtataacagtatgccagtaaatgaaaaaacaaaaaaattagaaaccaaaatgcacatttccaatggaaaaatctctaaacctcttatagttttattagacatttcatgt

SEQ ID NO: 1293 - DNA, 448 bp, Homo sapiens
ctcagccaacatgtgtggctgagtcatctctctcagctgttttcaagtttatgggcaggaaatcctctccacctgggaaaacactatccagaagatcagaaacaacagcaggatccattctgctttagtggcaaagcagaatggattcaagagggagaagactccagactcctgtttgggagagtaagcaaaaatggcacttcaaaggcactttccagcccacctgaagaacaacagccagcacagtccaaggaagacaacacagtggtggatatagggtccagccctgaacggagggcagatctagaggaaacagacaaagtattgcatggtttagaagtctcaggatttggagaaatcaaatatgaagagtttgggccaggctttatcaaggagtcaaacctccttagcctccagaagacacaaactggggagacaccctacatgt

SEQ ID NO: 1294 - DNA, 493 bp, Homo sapiens
acgctagaacttaaaaaaaaaaagaaacactggtttttaagacagttccttctcgatgtatgaatgtatagatgagaaaactcagttaatgatgtcatcaaataaaacaggcttttatatctgtcactggttcattgctcaagagttctttcttcaagatttattgaatacaataaatattacaatgtcacactttttttatttttttctcttcctctcttctcaatgccaaagtatatatatttcaatcctcaatcaatttcgatatgtggcatttttgtaagtcatatctattagcattggtgtcttttacttacagacacggtcctaaaccaagtgaaatgttcatttcagaaaatattttaaagtattagaaagctaattctacctttgaaattgtatgatggtgtaactatcccatcaaatttggagtttttcaaataagatgttattttttaaaataagtgttctgataaagtattttataagcagt

SEQ ID NO: 1295 - DNA, 240 bp, Homo sapiens
acaaatgagtctgagtgtaatagcccagagatttatatatagttgaatgtctaaaatggtaaaatgtgccactgtgtcaagttacagtggcttatgtttttcatagtaattcaaatgaacttcctatttttgatagtaaatgtcatttaatagtatacttgccatttgagcctcactgcaaaattagtgcagaggagaaaacaatttttaatgtaatcttgattttacctcatatactgt

SEQ ID NO: 1296 - DNA, 482 bp, Homo sapiens
ggccaccaggctttttgagaaacctcttgattctcagtctatttatcagctgattgaaatctcaaggaatttacagatacccccagaagacttaattgagatgctcaaaactggggagaagccgaatggatcagtggaaccggagcgggagcttgaccttcctgttgacctagatgacatctcagaggctgacttagaccatccagacctgttccaaaataggatgctctccaagagtggctaccctaaaacacttggtcgtgctgggactgaggccctaccagacgggctcagtgttgaggatattttaaatcttttagggatggagagtgcagtaaatcagaaaacgtcgtattttcccaatccatataaccaggagaaagttctgccaaggctcccttatggtgctggaagatctagatcgaaccagcttcccaaagctgcctggattccacatgttgaaaacagacagatggcatatg

SEQ ID NO: 1297 - DNA, 444 bp, Homo sapiens
aattacttctctcctaatgatgacttgagtcctgctattcaatgggagagtcaataagatcctgtaggatcttatttggaactgactttgtcgattttaattttgttcctgcttgtttttaaattttcttgttgtttccctagaaaggaaagatgacgcttggttttaaatatttaaaaatgtgcaagttgctttgctataataaaactaaatgcatacatacaaaaaataacattatagttgatgtggtagtgtttggaattcaaaatataaatgcttagcatgaggtaatcctttatctttccacattttaccagtttgtaagtttgagtatgtaactgataaaatgtaattcaaaagcaagaagaatgttgtgttttagtcctagagcaggggtcagtgaactttctgtaaagggccagatagtattatttaaggctttgt

SEQ ID NO: 1298 - DNA, 178 bp, Homo sapiens
acagctagacccagaaatttggaaggctgtagatcagaggttctagttccctttccctccttttatatcctcctctccttgagtaatgaagtgaccagcctgtgtagtgtgacaaacgtgtctcattcagcaggaaaaactaatgatatggatcatcacccagattctctcacttggt

SEQ ID NO: 1299 - DNA, 380 bp, Homo sapiens
ggctcgctgtgcccagagccctggatgcagtttctttggattcgagttaaggccagacctctgatttgcagtaacttggatccacttacagaaacttatgggattcctttctacctacaatacctcgcccactggccagagtatttcattgttgtagaggcacctggtggagaattaatgggttatattatgggtaaagcagaaggctcagtagctagggaagaatggcatgggcacgtcacagctctgtctgttgccccagaatttcgacgccttggtttggctgctaaacttatggagttactagaggagatttcagaaagggtggattttttgtggatctctttgtaagagtatctaaccaagttgcagttacatgt

SEQ ID NO: 1300 - DNA, 429 bp, Homo sapiens
acaggagatgtagacggagaaggggaacactaaattaacaagaagggggcctgggtccacagcccagttctgttgtaattagccatctgccctcaagaaacacatttattctgacctcaagaaaggcatttgttctatctggcattcagtttcctacatggtaaaatgagggatcgagataaataatctcttccagatttaatttatttcccttgacaagaaaatacaaatgagtttgacaattcttataaacactgtgtcctgaaaaccatacctatttatggggtgaatgagactttgtaactataagtggttggcttatttgtgcaacaaaatgctaatagtctatgttaataagaagggaaatattgttatttcagtaatgtggagatgctctattgatagtatccatagggttacaattttttg

SEQ ID NO: 1301 - DNA, 282 bp, Homo sapiens
actctccaaaggccctaccagagggaacacggcctactgagcggacagaatgatgccaaaatattgcttatgtctctacatggtattgtaatgaatatctgctttaatatagctatcatttcttttccaaaattacttctctttatctggaatttaattaatcgaaatgaatttatctgaatataggaagcatatgcctacttgtaatttctaactacttatgtttgaagagaaacctccggtgtgagatatacaaatatatttaattgtgtcatattaaac

SEQ ID NO: 1302 - DNA, 466 bp, Homo sapiens
  misc_feature 129: n = A,T,C or G
acttactatgtggctgcactgttctaaatgctttctatgtaataatgcagtgaacttaatctttgtaagagccccagagatgggtgctattgttttccccatttgacagagagggaaactgaggcaccnaaagggaaaggaaccctcctccccagaatcagtcagcaagtggcagagttgggatttgaaccctggccggggcactcaaccacaccccagattgaagccaggtaagccccacacttgacctcaggacctgcttgtaacccatcagacctcagggagccctgcaaagccctgagtccgcccctgccgccccagttggtctttaccaagccctttgtgcatgaaaaagcaatagccatatatgtaatgattagttatcacatgatgggaattcaattattgatttggggctgacttccatttctcggaacaggcagaaaggaagcggcagggaggtggg

SEQ ID NO: 1303 - DNA, 375 bp, Homo sapiens
actataaggtattggttcatgtaattatagaaactaagaagtcccctgatttgccatctgcaagctggagacccaagaaagctggtggtgtattttgaaggcttgagaaccagagggctgattccagtccaggtctgaaggcctgagaaccaggagcaccaagggcaggagaaaattgatgtcccagctccgcagtccagcagagttaattcaaccttcctccacttttttgttctattcagctccctcccacttgggtggatgcctccaaggtctatgttccactctgcttcccagaactcaccagtgttattcagtcccaggtgcccacagtggtacctggttcgacaacacaccactcactggctgccttcg

SEQ ID NO: 1304 - DNA, 436 bp, Homo sapiens
  misc_feature 237, 291, 406: n = A,T,C or G
accctgaccaggttgagcacatgtcatcaggacctcctgaggctgggtcatgggtatgtccttaacctgggcaaaataaactttctaaattgattgcaaaaaaaaaaaaaaaaaaaaaaaaaaaaaaagaagaagaagaagaagaagaaagaattaattaattaattcaggatgagcccgtaaagtgaaagcaaatttattaagaaagtaaaggaataaagaacggctgctccatanacagagcagccccaagggcagctggttgcccatttttatggttatttctggaanatatgctaaacaaggggtggactattcaagcctctcctttttagatcgtataggggaacttcctgacgttaccatggcatttgtaaacactcatgatgctggtgggagagtgtancagtgagaatgaccagaggtcactcttgtt

SEQ ID NO: 1305 - DNA, 486 bp, Homo sapiens
acttcctggacaagatcgacgtgatcaagcaggctgactatgtgccgagcgatcaggacctgcttcgctgccgtgtcctgacttctggaatctttgagaccaagttccaggtggacaaagtcaacttccacatgtttgacgtgggtggccagcgcgatgaacgccgcaagtggatccagtgcttcaacgatgtgactgccatcattttcgtggtggccagcagcagctacaacatggtcatccgggaggacaaccagaccaaccgcctgcaggaggctctgaacctcttcaagagcatctggaacaacagatggctgcgcaccatctctgtgatcctgttcctcaacaagcaagatctgctcgctgagaaagtccttgctgggaaatcgaagattgaggactactttccagaatttgctcgctacactactcctgaggatgctactcccgagcccggagaggacccacgcgtgacccgggccaagt

SEQ ID NO: 1306 - DNA, 467 bp, Homo sapiens
  misc_feature 450: n = A,T,C or G
acccagaccctccaaatccctgtcctgttggaaaaacagcagatgatggatgtctagaaaacacccctgacactgcagagttcagtcgagagttccagttgcaccagcatctctttgatccggaacatgactatccaggcttgggcaagtggaacaagaaactcctccacgagaagatgaagggaggagagagacgaaagcggaggagtgtcaatccatatctacaaggacagagactggataatgttgttgcaaagaagtctgtcccccatttttcagatgaggataaggatccagagtaaagagaagatgctagacgaaaacccacattacctgttaggcctcagcatggcttatgtgcacgtgtaaatggagtccctgtgaatgacagcatgtttcttacatagataattatggatacaaagcagctgtatgtagatagtgtattgncttcacaccgatgattc

SEQ ID NO: 1307 - DNA, 512 bp, Homo sapiens
  misc_feature 43, 103, 122, 154, 168, 182, 195, 212, 249, 261, 275, 280,282, 305, 317, 385, 387, 406, 439, 455, 464, 477, 496: n = A,T,C or G
acaactttttttttttttttttttttttttttttttttttaanaggaaaacccggtaatgatgtcggggttgagggataggaggagaatgggggataggtgtntgaacatgagggtgttttntcgtgtgaatgagggttttatgttgttaatgnggggggtgagtganccccattgtgttgnggtaaatatgtanagggagtatagggctgngactagtatgttgagtcctgtaagtaggaaagtgatntttgatcagganaacgtggttactancacananagttctcccagtaggttaatagnggggggtaaggngaggttagcgaggcttgctaaaagtcatcaaaaagctattagtgggagtagagtttgaagtccctgananaggattatgatgcgactgngagtgcgttccgtagtttgagtttgctaggcanaatagtaatgaggatntaagtccgngggcgattatganaatgactgccccggtgaancttcagggggtttgga

SEQ ID NO: 1308 - DNA, 566 bp, Homo sapiens
accttttttattcttaggctttcatgtgtagcaattttatgtttaacttttcattgactatgtttgtaaaagtaaaatttctctaatttgttagaatttacttgtggggaaggagaggttggagtggaacatagcataacccatatataagatacacgtggcaaatatctttttttctaattctttttagtttatctattagttaatgatagcatgtatttcagaatagaggctaagaaccatatagattttaaagatagcaaaatttctggcaagaaacattatatctttttttcatgggtttagcacttagttttagaagaatttgtgattgttgagtctgtgattctgattcagagggaaacctgtctaaaccctgagcaaagaaagaactgtatttgagcatagttctttacatgttttattctgtagccaaagtatatcaggatatcttagccatgatattcatcaatagaattaactcctatgttgtgttagtggtataccagatttgtatgtatatagttgtagaatacattatttgatctctaaaacatagttctgaa

SEQ ID NO: 1309 - DNA, 404 bp, Homo sapiens
acgtctaatgagttacaggcacccactgcaccaaaaggtcccctggtcccattccagaacccctgacaatgtccacctctagactagtgtttgaaaaactcagaattctttttgaactaagaagctggctgccttaacatcagcggcaaaaccaatccaatcaggaagtaggaatttgttggaaaattcatagatatgcataatttatgatccctgatatggtgtggtagttttcagatgtggatagtgtttgtcatccttaggtttgctggtaaaatgtattctgctgtagctgggctagagatccacacagctggtccacagcacagcacagccagctgaatgaatagacaggacatgaaagtgtttgcttttcaaagaactgctaaaaccaaaggcagtgt

SEQ ID NO: 1310 - DNA, 429 bp, Homo sapiens
acctgccccgtcggaggctctcactggcaaatgacagctctgtgcaaggagcactcccaagtataaaaattattacacagttttattctgaagaacattttgcattttaataaaaaaggatttatgtcaggaaagagtcatttacaaaccttgaagtgtttttgcctggatcagagtaaaaatgtcttaagaagaggtttgtaaggtcttcataacaaagtggtgtttgttatttacaaaaaaaaaaaaaaaattaacaggttgtctgtatactattaaaaattttggaccaaaattgctacctatcatctatctttttgattgcagggaatccctgccaaggtaacttgacagtcggcctaattctgttgacagaaaatgaagccttgacggttctaattatccaaaagtgggttttcatcaggacgt

SEQ ID NO: 1311 - DNA, 219 bp, Homo sapiens
acgggtgatggaattgctaggtgcctgcctgaaacgtggagcgaggacagaggcggagctggggagggagggcggtgggaaaggcggatgtgcagcgctagttcttgttaaggatgcttttcaggcttctctccacggcttcgtccagctcttcctccagctcctctttcttggacatggccaacttggactggtaatcccgcaccacctggtcgatgt

SEQ ID NO: 1312 - DNA, 403 bp, Homo sapiens
accttttcttcccatcaaaaatgcattaacaagatcatgcttatagttagtcagcacaagaaaaaaacgacaatttatactgaactatttaagtcctgcagtagagtgctcacaactccgagctgtatctgttaaccttttcaatagcattcattatgtgacattgtcaccaattacagtaaaagaacttcactaatttttgaaagctagaattactcaaaaaattctgcattgtaaataataccaggaatattgcatttaagcctaggatggcaaaattacttaaatcttttctatacttttttgtgtaatataggtaggaaaatgaatactatataagagaatgaaatatatcaagttcttatatttttacctaagaggctatttattttaaggaaagttg

SEQ ID NO: 1313 - DNA, 541 bp, Homo sapiens
acgtcttccagtaaaaaaggacaatataaataaacatcttcaagaacctctcagggacgtctgcacgtctactgtggggcgcacagcacagatggacgcaggggctggggctccagggcagttgctgccacacccgccggggtcctaccacactacactcagaaacgtcacacggagttggaaaaaagccacagcttgctcagcttccgacaaagagcggattcacagtccgttcgatctcagagaagtgagtggggcacccacttcatggggccaaccccactaaaaaaaaaaaggcaacgcaaccaaaaactaaaacaaaaaccaaaaacccacacaacccccgatttttttgaaaactcatggctcgtggtcaaaaaagtaaatgcttttcaaaatgttttgaaaaccctcaaaaaaaaacagcacttccttaaaaagaaaagtctagtaacgaggccatcccggcgtcagaagcggtcaggctgggtttgacaagatcagaaccgaaatgactacgaaagcagaaaagcaagcattc

SEQ ID NO: 1314 - DNA, 329 bp, Homo sapiens
  misc_feature 41, 43, 45, 59, 78, 138, 176, 190, 205, 260, 270, 288, 305,309, 319: n = A,T,C or G
acaagctttttttttttttttttttttttttttttttcggnananacggggaatcactntgttgcccaggctggtctnaaacttgagctcaagcaatcctcccacttggtctcccaaagtgctgggactacaggcacnagccaccatgctcagccattaggaagtattttatttancacatgtagggtanagccttgaatctgtntttcaaaaacatccccatgtgaatctgtcatttcgccaagcctacacaacactgnttttcatcanactatccagtagtcttanaaaaaaaaagtcttcanaganacaagggacncatgacttgt

SEQ ID NO: 1315 - DNA, 603 bp, Homo sapiens
  misc_feature 545, 583, 586: n = A,T,C or G
acatatatattgctggattcaacttgctaatattttgttaacagtattttttgcgtctattctcatgaaggaaaaatcctgtagttttctcgtaatgtccttgtctacctttgttatcagggtaatgcagagctcataaaacaagctggtcaatgttctttactcactattttctaaaagaggttgtgaagaattggtattatttcttccttaaaacgttggatagaattcaccagtgggaatcaggtgggcctggacttttcatgggagaacttatacatgactaattcaatttctttcctttatacagatctattcaggttttccatttcttccagaaacttttgataatttgtctttcaaggaatgtgtcattttatgtaaattgtcacatttatttgcataaatgtattcatatttccttattatcatttaaatttatgggatatgtattcatgtcaccgctttcattcctgatattaataatctgtcttccctttttaaaaaaaaaatcagtccagctaaagttttatcagctttattgnactttttaaagaatcagttttgctttcattgctattgnttngttctttttctatatca

SEQ ID NO: 1316 - DNA, 544 bp, Homo sapiens
actgcagctggagagattgttgaagcagatgttgccattgggaaaggcgatgagactccacttacaaatgtgaagacagaggcatcccctgaaagcatgttgtctccatcacatggctcaaatcccattgaagatcctttagaggcagagactcagcacaagtttgaaatgtcagactcattgaaagaagaatcagggactatttttggaagccagataaaggatgccccaggtgaggatgaggaggaagatggtgtcagtgaagcggccagcctagaggagcctaaggaagaggatcaaggagagggctacttgtcagaaatggataatgaacctcctgtgagcgagagtgatgatggcttcagcatacacaatgctacactgcagtcacacacactggcagactccatccccagcagccctgcttcttcacagttgcctatggatttgtcaactattaagaaaaacatagaaaatggactgatccgaagcacagctgaatttcagcgtgacattatgctgatgtttcagaatgctgtaatgt

SEQ ID NO: 1317 - DNA, 238 bp, Homo sapiens
acctctccctgcaccagaaatgacggtcaagcaagagagactggactttgaggaaacggaaaacaagggaatacatgaactggtggacatcagggagcccagtgcagagatcaaggtggaacctgcagaaccagagccagtcatttcaggagccgaaatagtagctggagttgttccagccacaagtatggagccaccagaactcaggagtcaggacttagatgaggaactgggaagt

SEQ ID NO: 1318 - DNA, 554 bp, Homo sapiens
cggccgaggtacacagagggagaggctagcagtatttttaaattggtttctaaattttttatagcttgatggtagataacacatttgcttcattgaagtaatctgaaaaaccaatcctcaaaagacctctcaattagaattcttaaatgacaatgttttctttatcatatatttgagagattgatttaaagaaaaataatgcttgactatctgaaataatattttaaccctatcataaaatctctgcctggtagaacagctgactgtggaagggtaaaatgcagagaaccagtcattggatctcccttctctactttgttactgaaatcttgaacctgtagaacattacttatcactgtgttcctttctaatgggaaaataataataaacacttgcagagtattttttaaaagtttttagctttaaaaaaaaaaaaccctgtgccttacacaatgtgtatattgagttgatactgattatgataattagatggtattatacaatcattcattcagcaaacattcacttactgagcacctactaatgttccaggt

SEQ ID NO: 1319 - DNA, 150 bp, Homo sapiens
gcgggacggggtgggcgcaggaccgagcggggagggaaagggaaaacggggctcggcattttgtgttttagaacagcgctgcacccccttcatgtagctttcgatgcttgtttctttccgtctttgttgtcactatctttgtctatcagt

SEQ ID NO: 1320 - DNA, 171 bp, Homo sapiens
  misc_feature 116, 135, 145, 160: n = A,T,C or G
gtcaggccttgggagagagaggaaaagcaggtagatggttcgagaaccaaatgtggtctccagactctttcccagagtcagcaaaagccctggggtgacccccaggactctagganccactccttggccctccancccaaccaanaggtgaaaagaaatnccttgggacac

SEQ ID NO: 1321 - DNA, 323 bp, Homo sapiens
acatgagatactcagcactttactataaaataggctttatgttagattatttttccccaactataagctaatgcaggtgttctgagcacatttaaggaaggctaggctaagctatgatgtttgaaaggtgaggtgtattgaatgcatttatttatttatttatttatgagatggagtctcgctctatcacccaggctggagtgcagtggcaacaacctcggcccactccaacctccgcctccagggcccaagtgattctcccggctcagcctcccgagtagctgggactagagggacctgccaccacgcccggctaatttagt

SEQ ID NO: 1322 - DNA, 531 bp, Homo sapiens
actggttgcatcatcctcatcctcagagctggcttcacaggcagtgtggaagagctgcatgagttctcgaaaacggtgggaaacctcagcaggggtcttatttcccagctgctgggagatgatgttgaaggtctgtggctgtgccccttgctcctggcacatggtgaggatcacacggtcagcttcccttgtccacaggacaaccttttccccagtggagctgaccttgctgttgttggcacacaccgtagcttctgcggcctttggctgctgctccccctctggacccttggcccgtgttccactgtctttagccaaaccccctctaggggctttgggagaagtctctgaggtgtcaattcctgatggagattcatggacagggcacgtcctgtctcttgtcttcacccgagctctgcttgagggcagccatctctcttgagtgtctggtttcccggacacatgtcttctccctgcatctctggtctttgaggaaacaggactcaggaaggaagcagggggttccacggt

SEQ ID NO: 1323 - DNA, 397 bp, Homo sapiens
aagaacaatgactctggcacagccactgcttttcacccaggaaagcagtttttcacagaatggctttgatttatacttaataaaaatggatcttaactgtagagccaccagctttcttgaaggcaatgaatacacttcagcatttatgctaagttctgttgaatttccttctgtggtcgcatatggattgtttccaaccattggcacaagacaatcggtatagaagtaaccaatcttagacatattcagtgtagaaataatcagatccattgcaagctggccaacatttccaacagatactgctggcattaggagggtgaagccggcaaggtcgggggccgactccccgcagggaacgaacatggtcgcagtggggtggccagcagggactaaccgc

SEQ ID NO: 1324 - DNA, 469 bp, Homo sapiens
acggatgctacttgtccaatgatggtaaaagggtagcttactggttgtcctccgattcaggttagaatgaggaggtctgcggctaggagtcaataaagtgattggcttagtgggcgaaatgttatgctttgttgtttggatatatggaggatggggattattgctaggatgaggatggatagtaatagggcaaggacgcctcctagtttgttagggacggatcggagaattgtgtaggcgaataggaaatatcattcgggcttgatgtggggaggggtgtttaaggggttggctagggtataattgtctgggtcgcctaggaggtctggtgagaatagtgttaatgtcattaaggagagaaggaagagaagtaagccgagggcgtctttgattgtgtagtaagggtggaaggtgattttatcggaatgggaggtgattcctagggggttgtttgatcccgtttcgtgca

SEQ ID NO: 1325 - DNA, 225 bp, Homo sapiens
  misc_feature 121, 133, 218: n = A,T,C or G
acaaattaagtagtggtctttaatcaggagacataaagtggctgggtttctctatgatttaatagcagccattgatgatatgtattgtttttaaaaatccaatattaccatagttgtccantatgatagctantagccacatgtggttattgaacacttaaaacgtggctagtgtgaattgagatgtgctgtaaatgtaaaaatatatgttgggtttnaaatagt

SEQ ID NO: 1326 - DNA, 297 bp, Homo sapiens
actgtgatgagattcgctggcatcagtgtctgcagtctgatctgattctgtattatcaagtaagctgtatggattgctgtctggatctttgagcacagaactgatggaggatttgccaccacgtggtccaccacgacctcgaccccctgaaacacttctgcctcttcctcctgggcgtctcctgctgtcacgctgatgtcggctgtctcgatcatcttctcctgccaatgaccaatcactcagctcgtctttacgctcagattccgtttcagaggggttagacagctcagaatttgt

SEQ ID NO: 1327 - DNA, 481 bp, Homo sapiens
acaggaatggaatggaatggaatggaatttaatggaatggaatggaatggaatttaatagaatggaatggaatggaatggaatggaatggaatggaatggaatcaacccgattggagtcaaatgaaatggaaaggaaatgaatggaatagaatggaatggaatggaacggaaaggaatggcatgaacccgagtgtaatggaatggaatggaatggaatggaatggaatggaatggaatcgaaaggcacggaatggaatggaatggaatggaatggaatggaatggaatggaatggaatcaacccgagtggaatggaatggaatggaatcaaactgagtggaatggaatggaatggaatgcaatggaatgtaatggagtggaaggcattagaatcaactggaatggaatggagtggaatggaatggaatcaacgccagtggaatggaatggaatggagtggaatggaatggaatggaatgga

SEQ ID NO: 1328 - DNA, 220 bp, Homo sapiens
acgccacggagatccaatctgaaaagcctgtcttgcggccttcactgccttgtcaacatcctccttatctccttcttctacctggcagagctcctcctcagttgcaggattaaagacaggaaatttcttgccactcactgaatcatgccattcattgtttatgaagatcttagtatattgaatcttcaaatcggtgagtaggacaggtaagtctggcgtg

SEQ ID NO: 1329 - DNA, 461 bp, Homo sapiens
actattgacccagcgatgggggcttcgacatgggctttagggagtcataagtggagtccgtaaagaggtatctttactataaaagctattgtgtaagctagtcatattaagttgttggctcaggagtttgatagttcttgggcagtgagggtgagtagtagaatgtttagtgagcctagggtgttgtgagtgtaaattagtgcgatgagtaggggaagggagcctactagggtgtagaataggaagtatgtgcctgcgttcaggcgttctggctggttgcctcatcgggtgatgatagccaaggtggggataagtgtggtttcgaagaagatataaaatatgattagttctgtggctgtgaatgttataattaaggagatttgtagggagattagtatagagaggtagagtttttttcgtgatagtggttcactggataggtggcgttggcttgccatgat

SEQ ID NO: 1330 - DNA, 480 bp, Homo sapiens
acatgacagatataaaaaacagtgtggaacaaaataatttaaattatggttacaatctactgaaggaaatatccacatcttattataaacacatttttagtctagggttgtaatttaaatattcgtttttttttacatacacggttgagacgtaaaagcaaaataacatttaagaggagaaaactttgacagaagacagtagttttgaactgcgcgcttgatgttaagtcatgataggatcgcccccttgccgtggcaattaagagaatcaatccattggtatgtagccatcctttttttttggctaattatatgagtaaatgaaaggatgggttaacaacgacacaaggggttcattttttggttttaggggaacagaaagcatcaaaagttaattgttggagacttgccttttgtttttcaaaaaataaaaataaaaacacaaagcagatctatgtgttttaattaatttatttacgt

SEQ ID NO: 1331 - DNA, 318 bp, Homo sapiens
  misc_feature 35, 37, 88, 90, 139, 267: n = A,T,C or G
acaagctttttttttttttttttttttttttttgntngcgtgtttgttttttgtttgtttgtttttgtttttttgtattttttagtananacaagttttcaccaaattggccaggctggtctcgaactcctgacctcanatgatctgccctcctcggcctcccaaaatgctggggataatgggattgttttttaagttcattgtcaccattagattttgacccagcactcatctctatgtggacttggtcttcatttcttcaattgngatctgagcattacaagacctgccctcccaaatgtcgttttcatggttgca

SEQ ID NO: 1332 - DNA, 367 bp, Homo sapiens
acaaaacaggaatgaaaacatacatatactgtcttgtctttatgtcgtattaatgccaaagatattgtcagggattattttaaagaagcccttactcatgatggctatttttaaaaatggcacaggacagtaacaggctgaaaagaaaacacctggttgaggggacaaattaagtaaatacaagacagcttaaccaaggaagtcagcgaatctccacaaatgaggcttttaataatactttactggtaagacattttagttgggtttttttttgatggctgaataacatcctaaagaagtattttaaatataatcttttaattttacaatgtagaaaacttctcacagtaagtagagagcttagagt

SEQ ID NO: 1333 - DNA, 377 bp, Homo sapiens
actagtagctgtgagagaatacaggaggggtggattatgtgaaaacaggaataaataagaggctgtttggaggagacatccaagtagatatgttcacagggaaattgaagacactccagacaactctagaatttctacaaaggagtccagggacaggggttaggagacacttcttgaggccaagtttccatactaaccacactccttttacataaatgtttgttttttggttgttttacatagattgtatgcttactcagtgaagctttcatgtgtaacaggtcatagagattatggggggctgctgcctacaccctcttccccttgtgttatgagcggctgaattgggttccacagataaattgggtcgctggagt

SEQ ID NO: 1334 - DNA, 576 bp, Homo sapiens
actactttaagtcaagtgtgatgctaatgatatcttaaaatttccaacaccttttgtgcagtgatcacaaagtctccacttaatttgagactgttactcagaacacgccttgcgtcacgggggctaatctaagtgttctagtctatatgactacattacatcatgatgtattgattgcctctggcctaggaatctgcagtttaagccagtgacacaacattttgcatttttaaatggtgattctcaccaaataatgcctccccacaaaagaggaaacctaataatgccccaaatcctctttttactccatcttaatgacataaaaattaagtgaattagagaactacaatgatcttaaaataatttttcaggcacatttcataaatgtggaaactgaggcacggatctgtttttgcctatgaaagataggtcctgtaactgttacacagtttaacacttctgaaattagaatattagagatcctgctaaatattacgtattgtttccttggcctctcttaatagtgccatttatatttttaatttaccagagttaggctcattaagatagtgtttg

SEQ ID NO: 1335 - DNA, 247 bp, Homo sapiens
actaaatatgctcaactgattccaactactttagcatatactacttgagcacatgacagtcttttgctgaggtgctttggcattctttctaaaagatagatgggtgtttcattaatgtggtatccatttgggtttgtgagttcttggatgatgccagtagtatgtaagttaggtaaaatatttcctattttcctcactttggagtttgttttccttatttaaaagggactttgaaatttaagtatgt

SEQ ID NO: 1336 - DNA, 425 bp, Homo sapiens
acagaccttcagcaaagggaagctttcggactccaaagccgtgttctgctgcaacttggcgagctttgtcctctccccctttatgcaactccacaagaaaatgattcgtgaagaccggtcgctcagcagatgcaaaaaccatgacacagaagaggaacccggcggccgccttccactgggagacacaaccacccttcatccttctttgggagtgaaaagtggtgctaggaggcgcgcaggctggcggagcaggggactcggagggagggtgcaaataaggaattcttatatatagtttttaaaaaaatctttgtatagagaaagagactgaacagggtcttggaaagcagcgaatcagtgtgtgttctccagcatctggctggaggggaagccgtgcagtcaggcggcccggcgcgcgggcaggg

SEQ ID NO: 1337 - DNA, 290 bp, Homo sapiens
actcttagctagatgaagaaataacatcatgtggaatttgttgttctcattaatttttgcagataaggtttctaaaaagtatcaactcattaaaaacaaattttacctgcctacccttttcctgagcttcacagcctataaaaaaaaacaaataaaatgtaaacggctaactaaaggcccaccacaaattttaaccaacctgtagaacttatagataagcccatctgcaaggctatttcgttaaaattcacttttaaagagaaaagtctaagccctccccgcaaaatagt

SEQ ID NO: 1338 - DNA, 170 bp, Homo sapiens
gtgcagtgccgtcactcagaggtgggtggccgtctcccttccctgtgtcctggtgaagagcggtgcagtgccgtcactcagaggtgggtggccgtctcccttccctgtgtcctggtgaagagcggtgcagtgccgtcactcagaggtgggtggccgtctcccttccctgt

SEQ ID NO: 1339 - DNA, 432 bp, Homo sapiens
acaaacgtggattttccagggcttgggaactgattcttgagcccagaagagccacgcctgctttgaggtcttttggagtggagatgcagccctgggaaatttggggagtcagcaggccagtgtgaagctattggtcctaggagtatatgagcttgctgtttctttgatggaaaatacatgcttctcttgtatactcagaagtgactaagggcaataactcattaatagccatctatccaacttctttactgagtgatgtattccatggggttacctttttcagattattgagttgctctgtaagcactaaaactttttaatcatttttaagaaactttttagattgtattacaaatttgccttaacagtaattagatgttgaatataattttaacattttattaatgacttgggtcatcagttaataccagt

SEQ ID NO: 1340 - DNA, 392 bp, Homo sapiens
acccaaccattctatttttctaaacttctaacctgaagctttggttatgagggaaaacaaagtttgtaagggttcagttctctgagatttttcagaatgtttccaacgaaatacattcctatgttaaaaggccagctcagccaagcttccttctggacaaataatgaattggttttatttgaagttttattctgtaaacaaaaagctttggaaactttgggatttcctgatgaaaagctaggagaaatgcacacctagtcctcagccaacgaggcactaaccagcgagaccagatgttctaaccagtcttctctaatgctgtcaatctaagaccacaaccacatctatacttcacaagcatctcagaagtcctaaatccagtaagatgcagt

SEQ ID NO: 1341 - DNA, 553 bp, Homo sapiens
acatacctcaaacataaacttaaggttctgtttaacaacaaccaaaaaaaaaaaaaaaaaataggatggaaatgtgtcactaaataacaaagtaaatgtctttaaacatgaagaccttaaattcatatccaagcaaaaagacgaagaataagttaacccaacttgtttacaaaaataattatttatcaagtaagcttttatagtagagctgcctcaatgaactgcctcagacttaatctcaatggtgtagcttgaaatagatttcctttattagcagggataagaagtatctgaatgaatgtgtcattaaattaaggaatactttcccaaaaacaataaaaagtttaaaaataaaaactgtcatttatttataaaatatcaaataaggcctctgactgaaaaaaagaaatctatataatgtttgggccattagcccttttctattcaatcagtctcatccaccccattcaccccaaacttaagataaaaaaattctcaagtgtagttttgaattttaccaatatatgaaattatacataaaattaccatataa

SEQ ID NO: 1342 - DNA, 585 bp, Homo sapiens
accttttcttcccatcaaaaatgcattaacaagatcatgcttatagttagtcagcacaagaaaaaaacgacaatttatactgaactatttaagtcttgcagtagagtgctcacaactccgagctgtatctgttaaccttttcaatagcattcattatgtgacattgtcaccaattacagtaaaagaacttcactaatttttgaaagctagaattactcaaaaaattctgcattgtaaataataccaggaatattgcatttaagcctaggatggcaaaattacttaaatcttttctatacttttttgtgtaatataggtaggaaaatgaatactatataagagaatgaaatatatcaagttcttatatttttacctaagaggctatttattttaaggaaagttgattaatatttaaatgattaaaaaataaatcaatgttaagtattaactgcacaaaatctaaaaaaaagaccacattacatcatactacattatatagatagatttaaagcagctaactagaagcctttttaaaaatttaaagtttctgacatcattttccaccattccatcaattcttccttc

SEQ ID NO: 1343 - DNA, 227 bp, Homo sapiens
atagtgccagaagtctgaggttcatgcttccctcaccttattaaaggatgttgcaaaattccatttttatatggaataaattgttaatattagctagttaagaaaaccatgcatgagtcattgcatgcaaaacatgggtatagtcaaagtgagacagtcatcaatccaaaaaagcaccagaaaaaaagttaacacttagattaagcctgacccaaatctgctgttgt

SEQ ID NO: 1344 - DNA, 638 bp, Homo sapiens
  misc_feature 635: n = A,T,C or G
acgggacagatttactgctatatcggaaaggccctccattttaccatgcaagttattctgtcattatcgagctagttgatgaccattttgaaggctctctccgcaggcctctcagttggaagtccctggctgccttgagcagagtttccgttaatgtctctaaggaacttatgctgtgctatttgattaaaccctctactatgactgacaaggaaatggagtcaccagaatgtatgaaaaggattaaagttcaggaggtgattctgagtcgatgggtttcttcacgagagaggagtgaccaagacgatctttaacaattcaacctcaaatttctaatttcaccaacaactatttattgagggctaggtaaaaagttctttttgttgtaatcgtccattaattcataagttttaaagggcatggtgctcccagcaccagaaaactatcagtgtttttaaagataaattacacaagggaggagaaagatccctgtgctaggactgcagattctatacttgcgttggcctctaactctccaatccagagcctcctgcctctggcgtcagtcttttccctcatccactcactggggagattggactagaggagtcctgagaggacacttccaacaaganaca

SEQ ID NO: 1345 - DNA, 522 bp, Homo sapiens
accggctgcgtggcaggtctgggtgttgtgtgcgaggacgtggcctttgaacaccgctgttctcagaggtccttaggagatatttttttttgtcttagggggactgtgttaagttcagacaaatcatgctgggtgtgtagagagtgtgaaatacgtcagtgaagtaagtagcagtgagcgattgtgaatgtgtaatgtaaatggaaaaccgggttttaccgtgttaagttattcactagggggccagtcgtagttctttgtaatcctctttcttccaaacctgctttgctgaaagttgcagaaaaggaagtgtgtggagagaaacagaacccttcagggtgggtcagaggacgccatccacagtggattcgtgttcgtttgcaggtggaagcagtgatttttaggacccactgattaaaaacaaacattcccaagtgtctctgagagatgctgtttatttgttaattaaaaagcttttttctctgtcttttaaattatggctttcatgtaataaggatattt

SEQ ID NO: 1346 - DNA, 418 bp, Homo sapiens
ctgcacttcaggaagggtgagcctagtgccaagccatccctgcacccgcactgtcagccttgcacagtggaaaccgcgggctggcagtcaggaaccctggctcctggtgtgggctcagacaccacttgatgtgccaccctggcttttccctttctgtctctcagcctcagtttctttatctagaaaatgggtgtggtgctcattcttatcctccttttccaggagggcaaagtgaaaacaacagagttgtgagtggtttgtaaattatgaacaactcaaagcctgagggactgggggagggcagatgccacctgagatctccactcagagcacatgtgcatgtgcatgtgcactgagggtcgtcatatgggaaggtccccctgcatgcacatgtatgaacacacacacatacacacgt

SEQ ID NO: 1347 - DNA, 594 bp, Homo sapiens
  misc_feature 225: n = A,T,C or G
accttcagtctgattttgacctgggctgcacttgtgatgataaggtagagccaaagaacaagttggatgaactcaacaaacggcttcatacaaaagggtctacagaagagagacacctcctctatgggcgacctgcagtgctttatcggactagatatgatatcttatatcacactgactttgaaagtggttatagtgaaatattcctaatgccactctggacancatatactgtttccaaacaggctgaggtttccagcgttcctgaccatctgaccagttgcgtccggcctgatgtccgtgtttctccgagtttcagtcagaactgtttggcctacaaaaatgataagcagatgtcctacggattcctctttcctccttatctgagctcttcaccagaggctaaatatgatgcattccttgtaaccaatatggttccaatgtatcctgctttcaaacgggtctggaattatttccaaagggtattggtgaagaaatatgcttcggaaagaaatggagttaacgtgataagtggaccaatcttcgactatgactatgatggcttacatgacacagaagacaaaataaaacagt

SEQ ID NO: 1348 - DNA, 277 bp, Homo sapiens
gcgtgctggctccttgtgctgtctgtcttgtagcgccctcccagccagtgctgttccctgaccgctttgctaaatcattttcagaccattgtggccgccatgagcaacctggtgccccccgtggagctggccaaccccgagaaccagttcagagtggactacattctgagtgtgatgaacgtgcctgactttgacttccctcccgaattctatgagcatgccaaggctctgtgggaggatgaaggagtgcgtgcctgctacgaacgctccaacgagt

SEQ ID NO: 1349 - DNA, 249 bp, Homo sapiens; identical to SEQ ID NO: 785

SEQ ID NO: 1350 - DNA, 279 bp, Homo sapiens
acagatccagggtctcggggttcgagaaagcacctccttgctccacggcttttccagcgatgatctgtttgacggcaacttccactttcttgccgttgagcgtatactgcgagggaaaggtagaaaaacaggaacatttaaacctgaaggggggaaaatccgcagccctggatatatccaggccccaaaggcccagctccacctggagcgccaagagtgaatgggtctcggctctaagatgcccctcttcccaccaggtctgcaaacgtgcaccgaagt

SEQ ID NO: 1351 - DNA, 374 bp, Homo sapiens
accgcagtaggctcctcgggctgcccctcggttgacaatggtctccaggatggtctctaccatgctatctggcctactgttttggctggcatctggatggactccagcatttgcttacagcccccggacccctgaccgggtctcagaagcagatatccagaggctgcttcatggtgttatggagcaattgggcattgccaggccccgagtggaatatccagctcaccaggtcatgaatcttgtgggcccccagagcattgaaggtggagctcatgaaggacttcagcatttgggtccttttggcaacatccccaacatcgtggcagagttgactggagacaatattcctaaggactttagtgaggatcaggggt

SEQ ID NO: 1352 - DNA, 286 bp, Homo sapiens
gcggcggcgacggagcaccggcggcggcagggcgagagcattaaatgaaagcaaaagagttaataatggcaacacggctccagaagactcttcccctgccaagaaaactcgtagatgccagagacaggagtcgaaaaagatgcctgtggctggaggaaaagctaataaggacaggacagaagacaagcaagatggtatgccaggaaggtcatgggccagcaaaagggtctctgaatctgtgaaggccttgctgttaaagggcaaagctcctgtggacccagagtgt

SEQ ID NO: 1353 - DNA, 545 bp, Homo sapiens
acataagttagtatgaaaaacagactatcacctttattgagaaacagccagtgttttcatttatctttgcttgcacatctgctctgttttggtttttctacaggaaatgaaaatcaacttgtttttttaatatgagtaaacttgtatgtctattttataaaattatttgaatattgtttaatgtctgaatatgaaagagttcttgatcctaaagaaatttagtggcacagaaaacaaagtgaatttgttagcataattattcctattcttatttcttcattttaagtcattgcaatggaaagtaatattataaaacggtaattacaacatattatcagtcacagttttctttccaattaaacacttaacttttgttattccctgtatataaatatataacacacattttctagattcacaaatttaaataaattactcaaaaaatgaaaattgattttgtaaacttttatttttactctttacgttgagttgatcaattttccatactaagattttcattcagaatcaaaattaagaaagttgga

SEQ ID NO: 1354 - DNA, 485 bp, Homo sapiens
gtgaaaggtgtgatggatgtcagatgtttcctatcaatggatccagattcaaatgcagaaactgtgatgactttgatttttgtgaaacgtgtttcaagaccaaaaaaacacaataccaggcatacatttggcagaataaatgaaccaggcttcagcagaagaaacacttcctataaatctcgcccaaacaggaaaggagaagcattagggtgtccgactacgtgggtttcatagctgtggaaaagccaaaggggagactcctgaagaaaggcggtgaagactgtgaagagcgggtcaggaagatgagcacagcactgctactcctgtgggcacagggacagcatgtctccagccagcgccaccttgtttaatacatgggaactcactgaaattcattctgtattttgcccgcaaagttttaaagctttcatccacagtcaggaattaaacttataccaatgagagcctcacacattcaaggatgt

SEQ ID NO: 1355 - DNA, 561 bp, Homo sapiens
acgtttagtgaaagcacaagaaaacaattatccatccctcctgtctccgaccagagtctccagagagctctgttaatactgcagcaaaggtgtgggattcttcccccatggcctgcagtctcagtggatgttccaatttagccagaaaggcgacctaagaattgccgggaggatggatggctggcgcgcgaattgttgcttttgctcttggctgatggttgaggaatgtagagagactgtgtggggtttgtgtgacactgcggtgccttgcagattaggtgagctttcaatctctctttaaaaggggcggcgaagaggacccgcaggctgcaaggagcaacagcgatgggtaggcacattcaaaaccagaaaaaattgttaacaaaccaaacaaacatgaagatcatactgggaaactgaggccagagacccgggaagaaaataaaaatcatttaaaggaccatcagccatattggcatacatttgtgaataacacacaatttcctgacattttggagcaagtaaagtgcgtaacataaatttttttggccagctctccat

SEQ ID NO: 1356 - DNA, 545 bp, Homo sapiens
acagcaatagaaagtattaaaaaaaattgagattctagggagaaaacctatattgcctgaaatgaaaatataccaggttaacagaagattagatttccagaagaaaagttgggtgaacttgaaggcatagcagtaaaactatccaaaatgaaatgcagagagaaaaaagaaaccagaaaaaaaatgaaaagaacttgagtaagctgtggatagcatcaggtagcctaccgtatgagtaattggagtccctgaagaagagagtaaaggagagatggagaaatatatgaagaaataatggctggaaatgtcaaaacttaatgaaactataaacccgcaagttcaagaagctcaaggaaccctaaactccagcaacatgaaaagtataccaaggaaaataataatcagattactcaaatcaataaaagagaaactctcaaaagcagccagaaggaaaatacatgctatatacagaggaataagggattacattggatttcttaccagaaataagacatctaagaagagtggaactatatctacaaagt

SEQ ID NO: 1357 - DNA, 477 bp, Homo sapiens
acaggttacttctgcagaataaaagttacagggaaaacttgactcgctttagaatggcagccggaacagagaggccctcagcaaacaggtcaacatactgcatattcagtcagtatttgctgaatgaatgaacggcttacagcaatcagatcttccccggtgttgtgctaatgccaacacatgattagaaagtgctctttgaatctacagataaagtgacaattcagacatttttctgattttttaaaaatcagaaaacaaaggagaagaaaaaacacatgaaaatttaaaaaggctattattaaacatatatatatatagtcttcctggtgagaagcattatactttaacaattatataagacagaaatattaccagaagcatagataaagctcaaatgcaacacatcatatggtgaataattcagaagataagaaaaactgatttctaatctcaatttttttaaagcctcttggt

SEQ ID NO: 1358 - DNA, 392 bp, Homo sapiens
  misc_feature 308, 311, 350, 351: n = A,T,C or G
acgaggtttaagggatatgctgaacagcagtgcaatggacataatgtattatactagtccactttatagagatgaactagttaaaggccttcagcaagagctgaatcgattgtattcccttttctgttctcggaatccagactttgaagaaaaagggggtaaagtctcaatagtatcacattccttgggatgtgtaattacttatgacataatgactggctggaatccagttcggctgtatgaacagttgctgcaaaaggaagaagagttgcctgatgaacgatggatgagctatgaagaacgacatnttnttgatgaactctatataacaaaacgacggctgaaggaannagaagaacggcttcacggattgaaagcatcatctatgacac

SEQ ID NO: 1359 - DNA, 667 bp, Homo sapiens
acaggagaaaaaggcattggacacacgactgggaaacctctccatttcaaaggatgcccttttcatcgaattattaagaaatttatgattcagggtggagacttctcaaatcagaatgggacaggtggagaaagtatttatggtgaaaaatttgaagatgaaaatttccattacaagcatgatcgggagggtttactgagcatggcaaatgcaggccgcaacacaaacggttctcagttttttatcacaacagttccaactcctcatttggatgggaaacatgtggtgtttggccaagtaattaaaggaataggagtggcaaggatattggaaaatgtggaagtgaaaggtgaaaaacctgctaaattgtgcgttattgcagaatgtggagaattgaaggaaggagatgacgggggaatattcccaaaagatggctctggcgacagtcatccagatttccctgaggatgcggatatagatttaaaagatgtagataaaattttattaataacagaagacttaaaaaacattggaaatacttttttcaaatcccagaactgggagatggctattaaaaaatatgcagaagttttaagatacgtggacagttcaaaggctgttattgagacagcagatagagccaagctgcaacctatagctttaagct

SEQ ID NO: 1360 - DNA, 501 bp, Homo sapiens
accatttgctgtctacttaattactcagataaaaatttgggattcattcttgatgattcattcattattcatgtcgtttcctcatttggaaagcctttctgtatttctcactttgtctagctcacaaaaccttttagatatggataaagtctctttccttttgggaaacttctccttacttccaggctattctcccacagcttccattgctgatgctaacatagcatggttatcatatgatgttacacttgatgtgtcatgtgttcctttccctgatggatttttagctaccttctattagagactgagacttaataatttcttatttaaatttctatgaaatagagcttcttgtgaggactgaaatagctagcactgagatataatgagtgcctgtggctgttagctactattattattacttactattatcttggtttctgcagtgcttaatataatatctgcctttaaaaaatggatatgttgataaaacaagtgtgt

SEQ ID NO: 1361 - DNA, 232 bp, Homo sapiens
actccagcctgggtgacagagtgagactgtctcaaaaataaaataaaataaattagtttataggtataaagaataaagcccaccacttactaccttagagagagggccagccagccactcatcattctagccttaaaataagaagtttgggctgagtgcagtggctcacacctatagtcccagcactttgggagactgaggcaggaggatcacttgaggccaagagttcaag

SEQ ID NO: 1362 - DNA, 273 bp, Homo sapiens; identical to SEQ ID NO: 706

SEQ ID NO: 1363 - DNA, 570 bp, Homo sapiens
acttaaaaaatgtttggactgcttttaaaacctgagcaatgtcattaatccatatgtggactagtgatgaatagatattttcataagagtttaaatgctgatatttggtggaagtagagagtaactcatattctatcaattcaagtattcttactatggttgctttccctatttgttcaatagactgataatactggaatttatagagtttgagccattacaacttttgtgaggatgtgtttcaaacatttctggacaaatcttattttgtatttctggaagaatgtagtaatcttctagaccgcttaaaaccaatgctcccaagctgaatattcttgagaaatttgtttttattatgccatttgacatttcaaatcagtgctcatatacagtaaacttgtgatagaaattgtattttattgctttttggattataattcatataaatataattacttgaatattgtttgagatcattaacatgccagggcagttcccactgatttagatggtccaagataatctcattcaggaggcttgaaacattaatggtttagtcttgtgaatttt

SEQ ID NO: 1364 - DNA, 594 bp, Homo sapiens
acactagaaagtcttttacaaaataatcatcttagatcaacagaagaccaatcttcaatgtcgtcctgcaagatgggttactttaacatctcctcctaaaaacaaaaacaaaataccagttagatttgtgcaactctgacaagcttttaaaggtccactttcatgaattgttttaagtcctcactttattttcttcaataattaaagatcatatgcatatttattggtaaaatacagtttgggtagtcaataaactcaccctggagttcccaaatgacattaaattcaaatctattcaggaaagaatctgggaatacaaccttcccatattcagaggttcaactatgctagattaaggtctactagaagcatctctagtaacccaagtaaaatgctatcacaaacaccaatttctaataagtttattacaagaacataaattgatctgtgcatatgatctttaatttatatcccagatttaaaagttcttgttttggtttgtagatttcactattagctataaaaagaaaaagcaagcattaaatcttaaaagaatgaacacttaaaatgaggctccacaattgaaatacaaca

SEQ ID NO: 1365 - DNA, 333 bp, Homo sapiens
actctgaggaggggaagggcatcttcgacagcaggaagaatgtgcttggtcacatgcagcagggtgggagcccaaccccatttgataggaattttgccactaagatgggcgccaaggctatgaactggatgtctgggaaaatcaaagagagttaccgtaatgggcggatctttgccaatactccagattcgggctgtgttctggggatgcgtaagagggctctggtcttccaaccagtggctgagctgaaggaccagacagattttgagcatcgaatccccaaggaacagtggtggctgaaactgaggcccatcctcaaaatcctagccaagt

SEQ ID NO: 1366 - DNA, 608 bp, Homo sapiens
acaactcagtgttatggcattcggcagcaatagtgtttgttccttattctctttttgtcacgttaaaaaaagcaattggaccatattaaatgtcactgctaaacaacaactttaaaacgccccttcataaagtgaccaagctattttgagagggttgatgctgacatgtccagtaatgacgttacaatttgtagcttaaactcaataactttaaggtccacatatccagtttactttgaaaactaaagatgttttaaaacttcatgaatacatcaacctgaggagtattttaggtcccaaatccagtttttaaatttatactccacaaaaaagaaaatacatacataaaaatttaaaccacagttctgggcccattaaaacaccaaaaaagaccccccaaaaagttaagatttccagcttatttctggaggggtgggacaaaataagaatgtatattaaaaacatttttccttaattcagacaaactaaaatcttaagaggaaacccagaccaaaatatcactcatgcaacattaagtgtattaactgattgatatgcaatgccatagtggatgaatagcaaattatatgatgcaatagcatttaaaa

SEQ ID NO: 1367 - DNA, 176 bp, Homo sapiens
acttggaaaaggaataatctcttggctttttaatttcactcttgatttcttcaacattatagctgtgaaatatccttcttcatgacctgtaataatctcataattacttgatctcttctttaggtagctataatatgggggaataacttcctgtagaaatatcacatctgggctgt

SEQ ID NO: 1368 - DNA, 414 bp, Homo sapiens
acttttagacaacctccctggagtccggtggctcacacttccactggaaatcaagatggaattagacatggcattaagtgacttggaggctgcagattttgcagaactgtccgaggattactatgacatgaggcggctgtatacaattttggggtcttctctattttacaagggttatttgatatgcagtcatttgcccaaggatgatcttattgatattgccgtatactgtcgccactattgcctgctgcctttagcagcaaaacaaagaattggtcagttgatcatatggagagaagtgtttcctcagcatcacctccgacctttggcagactcaagcactgaagtctttccggaacctgaaggaagatattttttgctagttgttggcttgaaacattatatgctatgtgt

SEQ ID NO: 1369 - DNA, 395 bp, Homo sapiens
acaggaaaaatgcttatatgagaacagaattatggggcactctgaatactaatttaagaaagaaatataaaccccttttaaaactcacataattttcccatttcccttgaagaagatactaatatttctgatatcatataggagtaaaaattgcggggaggtcctaatatccaatattaatagagctgtgattattcaagctgtagacttaaattttttaaatagagtaatggttgtttagtagagattaatatctaaataaggaaaatgaagaaagggactaaaaatcaagtaaataggataattgagtttcaatgggcaagaatttttatatcatgattttaccactctgaatatcaaagtcagtgatgtctccaaaaggcaaagggaagtgt

SEQ ID NO: 1370 - DNA, 368 bp, Homo sapiens; identical to SEQ ID NO: 940

SEQ ID NO: 1371 - DNA, 642 bp, Homo sapiens
ggaaatgccaccacacagacaacctctctcagtgccagcccagtgagtaatctcagtaaccccagatatcctaattacatgttcccgagccagggtattacaccacagggccagattgctggtttcattggcccgccaatacctcagaaccagcgattcattcccatcaatggatacccaatacctcctggatatgcagcgtttccagctgcccactaccagccaacaggtcctcccagagtgattcagcactgcccacctcccaagagtcggtccccaagcagtgccagtgggtcgactagcactggccatgtgactagcttgccctcatcaggatccaatcaggaagcaaatattcctttactaccacacatgtcaattccaaatcatcctggtggaatgggtatcaccgtttttggcaacaaatctcaaaaaccctacaaaattgactcaaagcaagcatctttactaggagacgccaatattcatggacacaccgaatctatgatttctgcagaactgtaaaatgcacaacttttgtaaatgtggtatacaggacaaactagacggccgtagaaaagatctatattcaaatgtttttattaaagtaagggttctcatttagcagacatcgcaacaagt

SEQ ID NO: 1372 - DNA, 288 bp, Homo sapiens
acttcttccacaaggccctatgtgagctcagtttaaaaccccagggccttggcaggggtcaggtgggcgggagcagggggtggaccttgtagcactggagctaaagcagccagataaggtgggctagttcttaagacctctgaagggtgtggctagtctctgagacctggacaacttcattctccaccagggcctggcccccatccccattgagctgtctcatgcgcaggttaatggagccgtaggtcttcctggagcccttgccggggacgaaggtcctccggcggt

SEQ ID NO: 1373 - DNA, 207 bp, Homo sapiens
acgggctgtatgttagaattaaagcatcacaactatctgattgtagggtgctggtgggcaatgcaatcaatcaacacgtctaccccaacagatgtggagacgcatggaaaaaatacatcaaccaaagtggtcagggagaacaaaacacagaaaacaccataaaactgaagacattatctcttcttgtctgaaaaaaggggttccctg

SEQ ID NO: 1374 - DNA, 394 bp, Homo sapiens
acttttctgtaaattaaaagaatatggagtcataaaatggcaagtgttttaggattagcctaaaattggacattgtcattgatttcaaagaaggtatgaactagcagtcttacagcctaattcttctttggactggtccttggcagcagttccttttcagactcgataaacagaattcagatgatgtaagtcaaaacaaaactttacaaagccaagcgtattatcttttgcattaacctatttttttccatcatacgtgctactagtatgtgcattagcatgatattctcatatacattgcattaaaaattaaaaggtggcagctcagggtgagctcttctgttgctcatttgttcctaaatttttaagggctttttctcagtcaatagtttgt

SEQ ID NO: 1375 - DNA, 239 bp, Homo sapiens
ctccaatattgagtctccccttttcacttagcaatcaaatctaaattttagctaagaataaggccatgggaaataaaactacatttcccaggttcccctgcagctacatatagtacttttactgaagctaacataagtttttaggtcaattactacagtctcttaaagttataaaaatattatataaaataccacaggctttagaggctataacttcatgtggttctgatactagcagc

SEQ ID NO: 1376 - DNA, 529 bp, Homo sapiens
aaagattatgttttttcttaaagttagggaggctcgggccctgacactgccagccccagtgagcatccctggctacctcgggattatgtgcaagctgctttgtcctacatttctttcatctggttcttattgggagtgcttctctctaataaaaattgatttcccacaaaataggcaaagctgaacaaagatgaatgcttttgataagttgggtttcacttcagttgaaacaatgtgatagaatatccaggtgtggcatgatggggcaggaggaggtgcctagagggaaaagttatttttgtttcttagtgttgtgttgtggggatgggacagataagaataagatgtttattgccctaatcatgctaagagactattattcaatatgcttttcccgcttttctaagaggaataaacttagacaaattacattataaacagttcccctactactatctcccactctagataaagccagtgggtggtatgggtccttttattccttatagtattatgccaaagaatcaac

SEQ ID NO: 1377 - DNA, 327 bp, Homo sapiens
tggataattatgatgccccagatattgccaatatcgccatcagcaatgagctgtttgaagaagcatttgccattttccggaaatttgatgtcaatacttcagcagttcaggtcttaattgagcatattggaaacttggatcgggcatatgagtttgctgaacgttgcaatgaacctgcggtctggagtcaacttgcaaaagcccagttgcagaaaggaatggtgaaagaagccattgattcttatatcaaagcagatgatccttcctcctacatggaagttgttcgggctgccaatactagtggaaactgggaagaactggtgaagt

SEQ ID NO: 1378 - DNA, 373 bp, Homo sapiens
acatgcattggaggtttgctatgcgtgtgtggattgtgtgtggatgacttctctctagggtgttgttcttttaatttcttgacagatgatggttgaatttggtgttttcaggtggactaggagggggttctcccactaggactgagacccagccttcttcttctggaattttctgaactgagactgaatggccaccgctgcacgttctgtctctggtgcatccatgtcaatgtcaaattcttcttgaactttcttctgtccatcattttcaccagatgtcttgtcttttccattggttgccccagcaccttgtcgctcactcatgttggctctaactcaacagctcagtcccgccgctcagcacagagaacac

SEQ ID NO: 1379 - DNA, 442 bp, Homo sapiens
gcgcttgccagcgtgttggagagaccgctaccggtgaaccagcgcgggtttttcggacttgggggtcgtgcagatctgctggatctaggtccagggagtctcagtgatggtctgagcctggccgcgccaggctggggtgtcccagaagagccaggaatcgaaatgcttcatggaacaaccaccctggccttcaagttccgccatggagtcatagttgcagctgactccagggctacagcgggtgcttacattgcctcccagacggtgaagaaggtgatagagatcaacccatacctgctaggcaccatggctgggggcgcagcggattgcagcttctgggaacggctgttggctcggcaatgtcgaatctatgagcttcgaaataaggaacgcatctctgtagcagctgcctccaaactgcttgccaacatggtgtatcagt

SEQ ID NO: 1380 - DNA, 558 bp, Homo sapiens
acagctgcacccaaggttaaaaagaggtagcagggaaaacaaacttaaactctttgtatatggtgaaacccatccctctcctgccctctaatggtatgtttacattatttcgttattatacaatgtagtggtataaacagtattattaaactgaaggcataagttaaaggaagtatgttactttgagctgatgtaggctcttccacttttatctgtattttatttatttggggactttgtattgctagggcttcagaatactaactttgacacagctcccagagaggtttgcaaacttttggtttccctctcaaatccatggtagtagtttcaaatgagtttgtggataatggatgtttagtccttatcatttgctgtgttttgacagtttttaatttgcagtattcactcacgaactgttttattttaggaataatgcaaaaccaaccttcgtccggtgatgagaatagccgtatgataagagaatttgctcatcgtgctttaaatgattaactgttttaccttatttagtatttcatagactttgcatgatatggt

SEQ ID NO: 1381 - DNA, 559 bp, Homo sapiens
  misc_feature 51, 81, 88, 91, 119, 239, 451, 509, 524, 537, 548: n = A,T,C or G
acaagcttttttttttttttttttttttttcagctcaacagctgtcatagngttaatgatgtattttatgtgttgcccaanacaattnttnttccaatgtgtcccagggcagccaaaanattggacacccctggaacagagtatggaaagggaaattagcagcttacggggggtaactctggtagacaacgccttaaccaagtgatcaaggttaacttcaccagtgagcaatcaggtanatatcatgtgccccctaatattatgtgatgagaaggccatttcacctctggggtattctttccccaaaccccaactgcagtctaatgatcagaaaacatcagacaaatccagattgagggacatcctacaaaatacttgaccagcccgcttcataaatgtcaaagtcataaaaaaacaagaagagacagagaaattgacatagattgaaagngactattatgatataataattaagtgcaacattatatcctgattaaatcctggaacanaaaaaggacattagnggaaaaaactggngaaatctgaanaaagtcgggag

SEQ ID NO: 1382 - DNA, 337 bp, Homo sapiens
acagcctagaactaatgagttgaaaaactagttttaaaaataataaaacttactggacagttttggaaaatgatattataaaacaacgaaaacaattggcacagtttaaccacctaatttctaagtgcactttgtaatgttccttgcaagctgccacttttcccgggataaagacaaaaagcttcagtcaggtgtcactggcttatggtgacggttttttttattgcattgccaagagtggattttaagaaaaaacactacaaaggtttcaaaaaccctatttattctctatcatcaaaaatagcaacagggggacttatacaacttttctgtgagt

SEQ ID NO: 1383 - DNA, 404 bp, Homo sapiens
acaacctctttccagcatactgccatcagctagtagaggcaactgcaaacaaatggttggagttgcccaggaaggtatttgggctggacaaagtgatagcaaccctccagaccctggctccttataaatgtatagcaattcattcatacaaactgcacagaggttaaacaaaacctactaaaaaaattaaaaaatcccacaaaatccccaacccagaaaacgtttcctggctctctactaacagtaaaatgtgctgagcccaaattttctgctctaacatgggtcccacggacctatcagtctgctctggggtgctgacctgctgggtcctgagcagggtctttccctaagcatcactgtgggtttggagacagctgtaatgtgtgcagctgtcagcagaaagt

SEQ ID NO: 1384 - DNA, 603 bp, Homo sapiens
acagctgctaagaagcagacattgtctctacaagctcagagagaagagaaagcaaaagcctccgagctctccaaaaagaaagcatctgccctgttgttcagcagtgatgaggagccaaaagaagacccagagagtgtcactcctctttgaagacgatgttgatagcggaggctctctgtttggctctcctcccacatctgttcctcctgcaacaaagaaaaaagagactgtctctgaggcaccacctttgctgttcagcgatgaagaagagaaggaggcacaacttggagtgaagtctgtggataagaaggttgagagtgccaaggagtcattaaaatttgggagaactgatgtggctgagtcagaaaaggaaggacttttgactagatctgctcaggaaacagtcaagcattctgatttattttcttcatcatccccatgggacaaaggaaccaagcctagaaccaaaactgttcttagcttgtttgatgaggaagaagataaaatggaagatcaaaacattatccaggctccacagaaagaagtaggaaagggctgcgatcctgatgcccaccccaagagcacaggtgtcttccaggatga

SEQ ID NO: 1385 - DNA, 168 bp, Homo sapiens
  misc_feature 100, 140, 152, 155: n = A,T,C or G
tatgaatgccttgtccaggaagagataatccaggaagcaggtgggtatacaggccagaagcttaagggaggtgtccaggctgagaacttgcagtccccanatgtgccatgctgttttaaggttcggggtttatgcacatnctgccccactgnctntaaatctccctca

SEQ ID NO: 1386 - DNA, 164 bp, Homo sapiens
ccatgcggaagaaggcaagagagaaggaggacttcccactgccggtgcggccgcagatcccgatctggaaagagagaagcaggcaccgccactgggactctggggctgctgggaatagcctctatgctagctctgggtgtgtgtgcaggtgtgggaggtcacag

SEQ ID NO: 1387 - DNA, 193 bp, Homo sapiens
  misc_feature 115, 124, 165, 185, 186: n = A,T,C or G
gcaggcccatctagagctattgctccttcccacagcaaaggtattgtggatgacccttagaatccattctctggtcttctgaaataccaagggcagatgtcacctccttcctcancaggacttnctctgggctctacaaccagctccttcacataaagggtttanagactccccttggctcccanncaccata

SEQ ID NO: 1388 - DNA, 235 bp, Homo sapiens
acacgtggggtgcccgccttacaactcaccttcgaacgtgtccaccatgcggaagaaggcaagagagaaggaggacttcccactgccggtgcggccgcagatcccgatctggaaagagagaagcaggcaccgccactgggactctggggctgctgggaatagcctctatgctagctctgggtgtgtgtgcaggtgtgggaggtcacagggtatctttttggcctggttttctgac

SEQ ID NO: 1389 - DNA, 281 bp, Homo sapiens
actggaagaaattgccaaggacaaagttttaaaagacttttatgttcatacagtaatgacttgttattttagtttatttggaatagacaatatggctcctagtcctggtcatatattgagagtttacggtggtgttttgccttggtctgttgctttggactggctcacagaaaagccagaactgtttcaactagcactgaaagcattcaggtatactctgaaactaatgattgataaagcaagtttaggtccaatagaagactttagagaactgattaagt

SEQ ID NO: 1390 - DNA, 539 bp, Homo sapiens
tttaattttagacacacccgtgaggaagttgcaagccaacaaaaaaagttcaaggatctagaagacgattaagggaaggtcgttctcagtgaaaatccaaaaaccagaaaaaaatgtttatacaaccctaagtcaataacctgaccttagaaaattgtgagagccaagttgacttcaggaactgaaacatcagcacaaagaagcaatcatcaaataattctgaacacaaatttaatatttttttttctgaatgagaaacatgagggaaattgtggagttagcctcctgtggtaaaggaattgaagaaaatataacaccttacaccctttttcatcttgacattaaaagttctggctaactttggaatccattagagaaaaatccttgtcaccagattcattacaattcaaatcgaagagttgtgaactgttatcccattgaaaagaccgagccttgtatgtatgttatggatacataaaatgcacgcaagccattatctctccatgggaagctaagttataaaaataggtgcttggtgt

SEQ ID NO: 1391 - DNA, 294 bp, Homo sapiens
acacacttattgtcccagcgacttggaaagctgaggcaggaggattgcttgatcccaggagtttgaggtagtgtgcgatgatcgttcttgtgaatagccactagccactgaactccagcttgggcaacattgagacaccctgtctcttaatttaaaaaaaaaaaaaaaaaaaggaggaaagaaagtggtctcagtttttaatgtaaatatttttaatgggataatgatattttaagattaatgtatattgtatatcagttaactataggtcaataattatataaaacttaaggt

SEQ ID NO: 1392 - DNA, 421 bp, Homo sapiens
acctcagtttgcaaactactgagaggtttactgtgaactgttcccaaattttcagctgaaggcaatgctgatgaagatcaaaatagctgtcctttcttatatacagtggcacataggcaaagttgaaaaacatggcagagtttcatatacatacagagattacaaatatcgaataattcacaatgttaaaaatgtcaaaataaaacgttttgacttatcaaatttcaaaagtgtggagtcttattctgtctgatcctcctcataatctaagaatcaaaacaggagaaacattcaaagtttaccaattttaatatatagtttgtctaacttacatagatgccacttaagtaaaaaataaacttacgccattgaaggaaggaatattttccttttcttcattttcattacttcatcagtgggt

SEQ ID NO: 1393 - DNA, 380 bp, Homo sapiens
cttctgtagagagcatgctgggtctgcatctcctctcgtctcctccatggtggtcactgcccctggcaggtctctgaaagggaaatgcttttctgcagaggcccctgcttgggcagttcacagtgagaccgaccccctctgaatatgataacagcctgtttcacatgaggagatgttaccaatcccgttcgctctgacccttgctggctgatcaccttgagcaacttacttaacatctgtgttcctcagtttctcatgggtaatatagggataattactggcacctgcctcccaggccattctgacgtgtaaccgcatataggagcccactggctgagtagctaccatcatcgctggtggggaaactggtggtaggggtg

SEQ ID NO: 1394 - DNA, 396 bp, Homo sapiens
actaagcaaggtccactctagtgtagctgaagagaatgcatatttgactacactatttctgtttactgtattttgcttcctactttatgtctaaatgctattgtttgtttaaaatcctaataatgtctcatttccaatatgttattttcagataactaaggttttgctactaatgtcagccatttactctcccactaattgggattattttttaaaagaggtctttctccccgaaatacaagttttagaaaatcttagaagaggggtgggtgcatgtcttaatgctgggaagcggcaactttggggttgaacttacttgaatggattaaaaattgcattgtgttacagagctagaaaattttatgtatgaaaaacgataatagccttacactgagt

SEQ ID NO: 1395 - DNA, 470 bp, Homo sapiens
  misc_feature 438: n = A,T,C or G
acaggagatctcatttgggacaactaaggataaaatgctggtcatcgagcagtgtaagaactccagagctgtaaccatttttattagaggaggaaataagatgatcattgaggaggcgaaacgatcccttcacgatgctttgtgtgtcatccggaacctcatccgcgataatcgtgtggtgtatggaggaggggctgctgagatatcctgtgccctggcagttagccaagaggcggataagtgccccaccttagaacagtatgccatgagagcgtttgccgacgcactggaggtcatccccatggccctctctgaaaacagtggcatgaatcccatccagactatgaccgaagtccgagccagacaggtgaaggagatgaaccctgctcttggcatcgactgtttgcacaaggggacaaatgatatgaagcaacagcntgtcatagaaaccttgattggcaaaaagcaac

SEQ ID NO: 1396 - DNA, 300 bp, Homo sapiens
acaatgtgatgttgatatatgtttaaaatgtggaatgattaaatcaggctaatttactttttttttctaaaaggaccttggcttcagaattaactttaattttcattccactttgcttatattatcttggcaagatcagtcctttgtagcaaggccaggatttaagctttgaaccgccagtaaggagggcattggtttgagcctgctttcaattttgtccaaaatccagttattcgtattttacctagttcccagtaactcacaatacaatccaagaatgtgccttattgctggcctggt

SEQ ID NO: 1397 - DNA, 307 bp, Homo sapiens
tcgaacgtgtccaccatgcggaagaaggcaagagagaaggaggacttcccactgccggtgcggccgcagatcccgatctggaaagagagaagcaggcaccgccgctgggactctggggctgctgggaatagcctctatgctagctctgggtgtgtgtgcaggtgtgggaggtcacagggtatctttttggcctggttttctgactagtttctctttggacaccacaggtttgggcttgtttcctgcagtgggtccagagagggcttacacagggaccggcacgcaagtgcaggcatggatgtccatt

SEQ ID NO: 1398 - DNA, 402 bp, Homo sapiens
actgaacacctaagaggcactcattcagactgacttctacaggacttctacgtgtgtgataaaagcctgtgaatcgtgagtccctgaaatatggtagcctggcccagcttctaaagaggaccttcgtagccacaaggcatgctaaacctctagggtctgatgctgtttttgttccaaatataaacgaaaggcactagtcagccgcctgcatagactttctaaacagtgagtaaataccatggaatgtcagaaatgactttatcatcgtcatcttgaagaaaaatatgaacactgatgaaggtcatttttttttttgacatctttctgtggcaaagctcttagaattcttcgcagttagctgctgaacagtatgatgatttggggattttctgaatcatttgt

SEQ ID NO: 1399 - DNA, 366 bp, Homo sapiens
actagtcccctagaaataggttaaactgaagcaacttgatggaaggatctctccacagggcttgttttccaaagaaaagtattgtttggaggagcaaagttaaaagcctacctaagcatatcgtaaagctgttcaaaaataactcagacccagtcttgtggatggaaatgtagtgctcgagtcacattctgcttaaagttgtaacaaatacagatgagttaaaagatattgtgtgacagtgtcttatttagggggaaaggggagtatctggatgacagttagtgccaaaatgtaaaacatgaggcgctagcaggagatggttaaacactagctgctccaagggttgacatggtcttcccagcatgt

SEQ ID NO: 1400 - DNA, 546 bp, Homo sapiens
acatagtaagactaagataccaagttgtatactaatatttttcaggccttgggcctcaaatatatatatttatatataatactccagtgtgaacagcaattcgatgaaatgtaaaatgtatctttttttttttaaatcacacacaagtattcataaccacagggttcaccagaaatctaaagcaaggagacactcactcatatagaaatggagttactcttccacagatcgttctgatcaaaggttttggaacagaaatgaattaatgatttttttgtataatatccaacatgtccactatcaaatacatttagtatgaaaaaacagatgaagaaaaggaacatacattaggacaaagtatctggttaaaatgctgttcatttaaataaagcccactctccttactttagagctccttggtgaaatggaggtgagtttgatggagtgcagttgatgaccactgaaaaacacgagccctttcaacaatgttgcaacactgttagtttttggtttaaacacacacacacactcacaaatgctaagtgt

SEQ ID NO: 1401 - DNA, 337 bp, Homo sapiens
acaatgtgtcactagtcaaagaggacaatgtatattctgtgtgggaagaatccacattcacagcagtttcatttccaatgatggttctataaaatatagtataatttctgataaatccattctgaacatcaacaggaagttggtcccactctaagacagcttcgtttttccctactttttttgtccgaacagtaggtcctttggaaggtggagcttgtttaaggtatgcctttatggattcagggcttcctggtccatcagcatatactggagtaactgttatcaaatagcatttgctctctgctaagttccctcttaaataggtgcgatgcacggt

SEQ ID NO: 1402 - DNA, 361 bp, Homo sapiens
  misc_feature 330, 341, 342: n = A,T,C or G
actccccacagtcggcgatgatcaccttctgctttggcttcccgtccttgctgccctgggcctcaatttgccgcaagacatctaggccttcggtgacctctccaaacaccacatgcttgccatccagccagtctgtcttgtcacatgtcaggaagaactgagagccattggtgtttgggccagagttggccatggatagtagacctggtcccgtatgcttgaggataaagttttcatcatcgaacttcttcccatagatggacttgcccccagtgccattgtggtttgtgaaatcaccgccctggcacatgaactgggggatgatgcggnggaagctgctnnccttaaagccaaagccctt

SEQ ID NO: 1403 - DNA, 435 bp, Homo sapiens
  misc_feature 422: n = A,T,C or G
accactcagtgctaccatccccacccctacaccacttccacacaggggcctcatggcatggtcagggtcccagctgtgggtgagagcagggcactgtccagctgtccactggggaagtcaagatgtcctaaggcccaggccagggcatctggagtctgaaggaccctagttcctagaggcatctggcagcaagaaggtgaggcatcagggaacgggaatcaggctgggactgatcagaggtgaagggacagagagaggagaggagaaagattgagctggggacaacagccaagctcacctgggcaggtctctgccacctccttgctctgtgagctgtcagtctaggttattctctttttttgtggctatttttaattgctttggatttgttaaatgttttctgtcttctgttaagtgtgttntctctggagatag

SEQ ID NO: 1404 - DNA, 282 bp, Homo sapiens
accagcgtgggaaggatgcacggcaaggcccagtgactgcgttggcggtgcagtattcttcatagttgaacatatcgctggagtggtcttcagaatcctgccttctgggagcacttgggacagaggaatccgctgcattcctgctggtggccaggtcacccgcggcattctctgtgacagtggcacatttcttgaggcactcctccttggtcaggtaattattgctgtttccgtcacagcccccatacacaaacagctggcaggatccgtcagtgacattgt

SEQ ID NO: 1405 - DNA, 228 bp, Homo sapiens
ctcactccacaggcagctgccgttctcacactgctctacttagactcaatagcagcaccattaagtatctagactttgtctttgctgtgaaaaatgaaaaccgattttatctgaaggaagtgaacatcagcatttatttggttaatggctccgttttcaacattgcaaataacaatctcagctactgggatgcccccctgggaagttcttatatgtgcaacaaagagc

SEQ ID NO: 1406 - DNA, 363 bp, Homo sapiens
acaaaagacagcgataatcacaaccaccacgatggtgatgacgccaacagaaacaattatgaccagcagcatattactgtccagaggagaggtggggctcccatgagggctgttactgccgctcattggaggtttgtagtcggatcctaggtctggcagccggcttcctttccctccagaccctgaggctttaggtgttctgaattggacagcttcagacatgggtcccatgccctttgagttccgtgcctggattttgaagtagtatggtgtgtcaagagttaactcttgtatctggtgagtcagtctgtttcccacaacaggctcaataacccagtcatgtatctctgcattcacatctgt

SEQ ID NO: 1407 - DNA, 400 bp, Homo sapiens
accttataacttttcctaaatcacttttggctctaccacttctattcctatatggaagctgaagtatgttattactgctgttacatgactactcttctacattctggttctatttctgctaaattattcttacagtttttatcaacttaagttttttaaaaaactgcctttttagaactctgaaacagtatttaagaattaaatttaaaaaattttaagttttgttcatcatatacaataaaattctgatatatgatgttagacaaattattagtcaggtaatttctgttcacctagtatcaatgctataaagaggttcaagtgaactttctttagtgagatgagtttcaatgatcctaaagatggtaaatgaacgattatttgtgtatctaaagtgtgt

SEQ ID NO: 1408 - DNA, 502 bp, Homo sapiens
acggaggaaacaatgcataactctgatggaattgaagtcatgaggcagcagagagcttaaattagagctttaaaaatttttattttttagagggaatttaattgggagtaacagcagtaatagttaacggagccagaatgcttgagtcatataattgcaaagcagagttgggagcaacagatgctaaagagtagttgctgtagttcctctttgggtcgtaggagcagttgtcatgttactatacagctactgaatgaagaagagttcttagtgaggcctgggtgaacagctcttcttagtattctgtgtgaccccattcgaccttttaacaaatccctaagtaaataaatagcccctaaggtaaactaagtttttctctgctgtttttttgcttgagagagctataactgtaatagacttatatttctgaacattttagtgcttgccaatatttggtaatatttatgtttcctatatttgtaatgaacattcttcttccggt

SEQ ID NO: 1409 - DNA, 272 bp, Homo sapiens
  misc_feature 121: n = A,T,C or G
accgtgtgtgtgtgaacttaattttcacagcaagggttagtatccctattctacagctgagaaacctgaggcatagaaaggtgaaataatttgtcaaagttcacaacagtatgtggaagancaggtcttggaacccagacagcctagtgcctcgaacttgcactctctcttcctccctcactctcatctggacgagctgcttgcttatcctcctctgtgcctttgcccatacttttcctctggaatttttatccttcccacagtccaactgt

SEQ ID NO: 1410 - DNA, 625 bp, Homo sapiens
acgccgttccggaatcacgtgagaagaatgacctgggcattcagagctacagcagatggcaagtttataaaggagcagagtgacgtgtcctgcacagaaacacatgactgttgagaccgttatttaagtctaacgggcatttgcgttgcacagtgagttggagataactcgggggatttacaagtccagttgcttgaaagagtcaaattgattgtggccttttctttcgctgctcataaactattaccacccagttagctttatttatttgtggtgttaagaatcttgatgtgaccgaagaagtctgtggcatggtgccaaggcaggcccaacactgggaaaggactaattttttttgtatattgagagaaaagtttcacatagactggccagagttccgaagcacaactacagacagcgtcatgacagggcgacttggcaggacaccttgatccaaggcgacagcatttggcaaggacacggaagttgggtcgttgcatccatcatcaggagttgacttgttctgagcaactgaacagaacacaccgcgatgctctcgacacttccgctcctggacttcagtcacgagtgagttgatggtgacttgacctgagagatttcacag

SEQ ID NO: 1411 - DNA, 448 bp, Homo sapiens
aaaagagtctgctagttaggaccacttgactaagagtgggtatagaagaaacctaaggaagaaaagttagatttgagacaacatattggagtatgttgaaattaaaggtgaataaagtagtggaaattcgatagaatttaaaggagacattgtaacataattttctcacaaaatggggggtcgctgctccagctgaggtcccactggcaggtgagggtgtcactccccacgatgtcatagccggggtcacactggtaggtgattctggctccccgcaccaactccgtgtgagaagtggttttccagccattctggatctcgggtaaatccgagcaggagtcattccttgatacctctatgtagttcatgataaatccctggccctttccaaagatgaggccagcagggtccgaatggaactggatggttaagtctggcgtggaggagt

SEQ ID NO: 1412 - DNA, 421 bp, Homo sapiens
acagcaggaccctaccatagaaagataactcttggtgtaactgactaaaagtgacagaggagcttgtccgtaattagtggaatattcccacataaattgattagcatattcctttggatctttcctgaacgcctcacagatttcatcatttgtgggttccacgtaggtagggaattcctgtggctggtgtttcagagcagccatgcagagctttcgttccaggccctctttggtgcagcactcagcagtgcctgggtgaacggggaatggagaattactttcacaggacttggcagacagtgctgaggtcctggtgtcatagcagtcagggtcagccccttccgcacagcaggcttcggtcaaggagacaacttccttcacaagttggctgacctgttcaaacgtgccactgggaaatttt

SEQ ID NO: 1413 - DNA, 563 bp, Homo sapiens
acttaatgtttactacaagccaggaacaattttaagcactctataggaattaacttacataaaacagattattttattattcaatttacagaccaagtttggtgtgtataccatttttaaatgaatttgtgttttattagttacctatagttttcttcttcagtgacatatccacagctttagtttagcacaagcagggcattaaaatctgtttaatgaatgcacggttatattttgtctcggaatgtatagtcttctttatttataccagattttgatttcatctccatttttcctatgcttattctttccgtgttctaatagactgaggtcctcttctctgggactttcctaaaggctgctttagatttgtggtagtaggaatgggactgacagagtggatgaagtcaagtgctgtgtgtgcagagagggagactttgatgacaatggctatcagccctgcttatgactctctgctctgttttgcttcttgtaggctttcagttctgaaatggcaaagaggtccaagatgctgagtttgaacaattacagtgtcccccagt

SEQ ID NO: 1414 - DNA, 403 bp, Homo sapiens
acaggacgagtttgcttcaaaagagaaaggtatgcgtgaaaaacatctgcctttacattctcttcacgctctttaaatctggatattagtgcaggagagacggtcttgtagaattctggaagcatttcatgccttgtgctaactacagcatccaagcacttcgcagctgcacgtctcactttccaactcatgtcatcatcatcactgtattcatcatcactcccttgatcatcatcatcaccaccatcagcatccattgcattttcatcttcatcttcatcatcgtaattataatttggatcataggtaagatatttaagacaaatatttataatggtagaaacatgaggatatacttccttaggacatcttcttacaaatgattcaaaggcttgaatacagt

SEQ ID NO: 1415 - DNA, 247 bp, Homo sapiens
accgcggccgttaaacatgtgtcactgggcaggcggtgcctctaatactggtgatgctagaggtgatgtttttggtaaacaggcggggtaagatttgccgagttccttttactttttttaacctttccttatgagcatgcctgtgttgggttgacagtgagggtaataatgacttgttggttgattgtagatattgggctgttaattgtcagttcagtgttttaatctgacgcaggcttatgcggag

SEQ ID NO: 1416 - DNA, 423 bp, Homo sapiens
ctagctctccagttcgcccgttcctggcctgacccccaccaaggcccataccgcagtaggctcctcgggctgcccctcggttgacaatggtctccaggatggtctctaccatgctatctggcctactgttttggctggcatctggatggactccagcatttgcttacagcccccggacccctgaccgggtctcagaagcagatatccagaggctgcttcatggtgttatggagcaattgggcattgccaggccccgagtggaatatccagctcaccaggccatgaatcttgtgggcccccagagcattgaaggtggagctcatgaaggacttcagcatttgggtccttttggcaacatccccaacatcgtggcagagttgactggagacaacattcctaaggactttagtgaggatcaggggt

SEQ ID NO: 1417 - DNA, 359 bp, Homo sapiens
actcagccttctagaggagggtagcctagcagaggagaagccctgagtggaagcagcattttgaaggcatcgtcattcttagaccagctaagagctgagggcattctctatctttgccagcagacaatgagactccaggattaaaattaaaagcccgtggtgcatcctttccttgacattaactttccacaaaaccttggaggagtcaaatcccacactgcacatactccggtgtctccagctgtgaagtgggaccagtatcaatacatgggaaagtgctgagaaggaagaaaatatttcaggtataatactaatccatcaaacacgttttattcaagaggcttggcaccaactttgtg

SEQ ID NO: 1418 - DNA, 264 bp, Homo sapiens
accaatactttgaccaacaatagtcacaatggtttataacaactgaactcaaaggccacgttgatttttccacccacaacttgattctgatttttctagagtcattcataagaacaagaagtagtggatcctttcttcctccttagtatctgaaaattctgaactctgaagagaaattccatttggtttgtcattttcacctctgtgcatttcggcagctcttaacttttcttcaattctttactctattagagtgacttttct

SEQ ID NO: 1419 - DNA, 213 bp, Homo sapiens
acaatagttcattgttgaatcctgagacctaagatggaagctggaaaagagttaagtatggaaaaaccattcatataaaaaatgagaaattttactttgaggggaaaaaaggcaagaataatcaggaaaaagagtgataatatatttagatttattatagatagaaacttatttcccaaattaattctgtaaaattaataatactgtctcaga

SEQ ID NO: 1420 - DNA, 572 bp, Homo sapiens
cagtgcttctcctcatactgtgcatgcagcgctccttcccagagcctggcagattgtatcttgacctcattctggccatcttggcactggaactcatctgttccctgatatgtctcctcatttacacagtgaaaatccggagatttaataaagctaaaccagagcctgatatacttgaagaagaaaaaatctatgcttaccccagcaatattacctcggagactggattcaggtaagatttagaactatttcaagcctagaagaaattgttgaaaagcaaggagacaccattgaatacctgaagcgacacaatgcgctgctgagtaagcgattgttggctctcacttcctcagacctgggctgtcagccaagtagaacgtgagaggctcacggtcatgacagcaattgcagaggaacccagagtaattgagactgactgaccacctgacaagctgccacggggaactgcagcttttgctgaatagcattttacagtgtttgttggaaacctgaatttggttctgacttctgtggctggttaaaatatagggcttgtgggtcacttgaaaagt

SEQ ID NO: 1421 - DNA, 504 bp, Homo sapiens
actgggaaaggtggaaagaattctgaggctcagttggaagatgaggaagaagaggaggaagatggactttcagaggagtgcgaggaggaggaatcagagagttttgcagacatgatgaagcatggactcactgaggctgacgtaggcatcaccaagtttgtgagttctcatcaagggttctcgggaatcttaaaagaaagatactccgacttcgttgttcatgaaataggaaaagatggacggatcagccatttgaatgacttgtccattccagtggatgaggaggacccttcagaagacatatttacagttttgacagctgaagaaaagcagcgattggaagagctccagctgttcaaaaataaggaaaccagtgttgccattgaggttatcgaggacaccaaagagaaaagaaccatcatccatcaggctatcaaatctctgtttccaggattagagacaaaaacagaggatagggaggggaagaaatacattgtagcctac

SEQ ID NO: 1422 - DNA, 517 bp, Homo sapiens
acctggagggatgcaagacttcaattaccttagcagcaactgttttgagatcaccgtggagcttagctgtgagaagttcccacctgaagagactctgaagacctactgggaggataacaaaaactccctcattagctaccttgagcagatacaccgaggagttaaaggatttgtccgagaccttcaaggtaacccaattgcgaatgccaccatctccgtggaaggaatagaccacgatgttacatccgcaaaggatggtgattactggagattgcttatacctggaaactataaacttacagcctcagctccaggctatctggcaataacaaagaaagtggcagttccttacagccctgctgctggggttgattttgaactggagtcattttctgaaaggaaagaagaggagaaggaagaattgatggaatggtggaaaatgatgtcagaaactttaaatttttaaaaaggcttctagttagctgctttaaatctatctatataatgtagtatgatg

SEQ ID NO: 1423 - DNA, 276 bp, Homo sapiens
actccaaagttgttcaggaacgcctcgtgcaagccgaatactggcatgaccccataaaggaggatgtgtatcgcaaccacagcatcttcttggcagatataaatcaggagcggggtatcaatgagtcctacaagggaaacctgatggccctgaagaagtttgtgatggtgaaattcctcaatgattccattgtggaccctgtagattcggagtggtttggattttacagaagtggccaagccaaggaaaccattcccttacaggagacctccctgt

SEQ ID NO: 1424 - DNA, 517 bp, Homo sapiens
acctggagggatgcaagacttcaattaccttagcagcaactgttttgagatcaccgtggagcttagctgtgagaagttcccacctgaagagactctgaagacctactgggaggataacaaaaactccctcattagctaccttgagcagatacaccgaggagttaaaggatttgtccgagaccttcaaggtagcccaattgcgaatgccaccatctccgtggaaggaatagaccacgatgttacatccgcaaaggatggtgattactggagattgcttatacctggaaactataaacttacagcctcagctccaggctatctggcaataacaaagaaagtggcagttccttacagccctgctgctggggttgattttgaactggagtcattttctgaaaggaaagaagaggagaaggaagaattgatggaatggtggaaaatgatgtcagaaactttaaatttttaaaaaggcttctagttagctgctttaaatctatctatataatgtagtatgatg

SEQ ID NO: 1425 - DNA, 169 bp, Homo sapiens
  misc_feature 156: n = A,T,C or G
cctggaagactagagtgtaaaagatcaaaacatagaaacccttaggaggtgactacagccaacacattggtggctttgacccacgtggtgacaataaaaatagaaagaagtagtcatatttgagggacttttgggaggtggagtcaataggacttnctaataaataaca

SEQ ID NO: 1426 - DNA, 53 bp, Homo sapiens
  misc_feature 31: n = A,T,C or G
tgaggatatgaagcttaaaaggtgaaaactngaatacccttagaaaaggggaa

SEQ ID NO: 1427 - DNA, 579 bp, Homo sapiens
acgtttagggcaagatgtcaatacagcataaatcccatggtattttggttttcttctggagattaaagctgtttttcttgggataaatgcagcagcaaaacacaaaccagttgatcaaaaaagcacttctgccataactccaataattttcagggcacatcaaccgacagtagttttgccattcccagttcttttaaggattacatctctgcactgttgccttaaggacgtctgtaaaagcttgttctctgttaagccagtttactgactacagcctggttgagagaatttagttggttggtccatttatctagtgcagtatatcgtgcaccacccctcttctgatgatccagttcaaggagttggttgacttgatcaattcggccatgaatagtgttatccaatatgcactgcaccagcaagctctccacatcagctacatctatgtttaactccttagaaataaaaggaatatgtattcttgtgtaaggcttaattaattttataagcacttgtgttctgatgtttcgcaaaagctcttcaatgtgttctcttatgaaaggatcatccatgatgttg

SEQ ID NO: 1428 - DNA, 340 bp, Homo sapiens
  misc_feature 308: n = A,T,C or G
actgtgacaacagcaaggatttatgagcatgcctacagtccctaccaaaatacccgagcctgtgcttatccaactccttctctccagtaaaccacgcagcttgagagaaaattctgggcttcagattttaccatgtgcaccctggaagttgtggaatgtccgtaatgagttctgtgtcatggatgctataacgctagcagccagaaacccaggctttctacctgtttctttgatgtttaatcacaataaactcctggctatacaaaaccatcgcaacttgctttttaatggcatcaataaaatagctnatttcttggaagacccatgaggaaaacgaatg

SEQ ID NO: 1429 - DNA, 487 bp, Homo sapiens
acagtgcataaatgtggaaccagaagatcccctgggcagagaatggaaaagaaaatagggttcacttgctctaagaggctttcaggtctcaaagccagagccacgaagaggtgatccacatagatgttcaagttcacaggggtccatcagttattcactcaacaaacattggtatctattatactctaggcacttttctaagcactagagacacggtagcagaaaagacagaccagaaacaaacaggcaaacctgcccttatggaactgacaatccaatttagaaagaaacacgtaattttatataatgagcagaatggctctgcaaaatgaacagtcgccccaggagaggggctctacaggagaaggtgacatttgtgctgagaccacagtgtgtgaaggagccagccatgggaagaacattccaggcaggaggaacagcaagtgcaaaggccttgaaaatgcaggggacagaaggaaagccaccg

SEQ ID NO: 1430 - DNA, 604 bp, Homo sapiens
actactaaattaataaatttattccacttttgaaatgacagccaaaaatccacctaattgattcttatttggcacgttcttctcaattctgttcactaaattaaaattactaaatttaaactgccaagagccatgatgttgtctgcacaagacaacattttccatcactttcagaaagttatatttggcatgttaaggaaaaaaaatataatcccacagcagcagctatttaaaataagacagccacaggattcatgcagaatattttaaatattcctgttgaacacaatgatttaattgattttttcttcacggatgatgctcccaaacatcctatatgcatccatggaaatttaaagatcctggaatagcgtcttccatgtgggacatcttaaaagatagtattttggcttcagtgagttacacaaatgaatcaccagtccttattaattcaatgggtctgtttacagagtgtggtaatttcgttctttagatttgcagaatttataaagaaagaaaattacagcctgcacacccaagaccaggacaattcctccaatgaaactggctgcatcaaaggtagactttcgcacaggttgtgagg

SEQ ID NO: 1431 - DNA, 251 bp, Homo sapiens
  misc_feature 130: n = A,T,C or G
acacagtggagcaacgaaaggagaaatctcggccacacaggacgtcatgatggaggagatattccgagtggtgtgcatctgtttgggtaatccaccagagacattcacctgggaatatcgagacaaaganaaaaattatcagaaaattggccccataacacccttggagttttacagggaacatgtcaagccactcttcaatatggaagataagatttgtttagtgaatgaccctaggccccagcacaagt

SEQ ID NO: 1432 - DNA, 517 bp, Homo sapiens
actatggtttagggctatgactaatatttcaggccatttccggtgaaagaaacttagttttacaagaaaaaccatttgctactgaatgcttaaactaattttagtgtttaatgttacatgcttaaatttttttcagttttaacagtggcatatttaggcatggaaatattattatgaaatttattttcaggatctgctataaggttgaaatttagcccagctctaggcattttacaaattatttttcaagcagtcattcttgattgtttgactttttttttaaattaaagattgggaatgtatgtgagagtatgcatatgtatgggtgtgtgtgtgcgcgcaatcaaactgtggtgtaaatagattctcagtgaattctggtattcagactctattccactagtgaaagaaccattttttaaacttcccttgccttttttatttatttaattttcttggtttggagatgtcagtcccaaacaccagagtctgtacccctaccaaggatacccacagt

SEQ ID NO: 1433 - DNA, 178 bp, Homo sapiens
gaaataattcactgaatgtcatcccccaaaaatatggagaatatttatttagcatgtaatattttttctgcaaggggcactgaaatattaagaaactattaggtaaagtaataagacaaggaagttttcctggttttagcccatgcacaagtgaacaggaaatatccatgctgtctgt

SEQ ID NO: 1434 - DNA, 326 bp, Homo sapiens
  misc_feature 311: n = A,T,C or G
acgcctggacccctgtgacttgcagcctatctttgatgacatgctccactttctaaatcctgaggagctgcgggtgattgaagagattccccaggctgaggacaaactagaccggctattcgaaattattggagtcaagagccaggaagccagccagaccctcctggactctgtttatagccatcttcctgacctgctgtagaacatagggatactgcattctggaaattactcaatttagtggcagggtggttttttaattttcttctgtttctgatttttgttgtttggggtgtgtgtgtgtgtttgtntgtgtgtgtgtgtgt

SEQ ID NO: 1435 - DNA, 589 bp, Homo sapiens
actaacacaccagggaaggtctagttcttcaggtcattatgtatcatgggtgaaaaggaaacaagatgaatggattaagtttgatgatgacaaagtcagcatcgtaacaccagaagatatcttacggctttctggtggtggagactggcatatcgcttacgttctactctatgggcctcgcagagttgaaataatggaagaggaaagtgaacagtaatcttcattttagtatttatgcttagatgtgaaaataaatgttatttgttgatcatttctataatccagagctttagaggaagacacataggtgggtttatgtttcacctcatttggaacaaaagaggacagaagcagaccactctgtgcaccaacctaaaaaattacagagaagagaaaattatctttggattgtgctgccctatataaaggtggcagaaagacatttttaaaaagcttattatttcttgcattattttaaaaagttcagagttgaaatgcctttcaaccatttccttctgtggtcatttttcttgctgcctttttcacccaagattcagcagtcagatgtttactgcacacctattaccta

SEQ ID NO: 1436 - DNA, 319 bp, Homo sapiens
accagcagacaaagagttccgccttagtaattcagtcttatatccggggttggaaggctcgaaaaattctgcgggaactgaagcatcaaaagcgctgtaaggaagcagtcacgaccattgctgcatattggcatgggacccaggcacgaagggaactgagacggctgaaggaggaggctaggaataaacatgctattgcagttatttgggcttactggcttggatctaaggctcgaagggaattgaaacgcttgaaggaggaggctaggcgtaagcatgcagttgctgtcatttgggcttactggcttggactgaaggt

SEQ ID NO: 1437 - DNA, 273 bp, Homo sapiens; identical to SEQ ID NO: 745

SEQ ID NO: 1438 - DNA, 448 bp, Homo sapiens
ttaaatgaagatactacagacctttaggaatcatatgccttggaaaacaatctatgtatggtgacttgtcaacaaagtatcttccctagttggatgccaacttgtaaccaagaagactttcttctattcaagagaaatttggttttagttttgatttaatacttggtccctctaattaatcactggggtgattaacatgaattctgttggtataaagagtattggttccctaattagcctgcattgttgaagaccacatagatgtattactgataagactatgaggctcatgtttaattactcaatcaaaattaggaagaaatgctttggaagaaactaaaaaattacaatttaggttaatttttaaaggcaatttagtatacatgatgagctagctttgaaatacagatttaaatgtttaaaaattaatttgagggcaagatttggt

SEQ ID NO: 1439 - DNA, 486 bp, Homo sapiens
  misc_feature 415, 476: n = A,T,C or G
acagggttcttcctccctgatcttgcgttttgttagggctcggctgagctattaaatttgccttaactctctgcgggctgccatgctgattacatttttaagagtaagataatactgatttgaccttcagaaatacagaggttggatgcggattttctaactcaaaactaactctgtttcttacatttagtgccaggaacaaaacaaaaacaaaacataaacaccattaacattggttgaactaagctaatcaattaccaaactgtagaatgctgcccttcggccttcaaggaggaattcctactgtttatgaagatcgggtttgggtttttggtttttttttctttttcttttttccgtggtggtggtgggtgggcttttgttctttttgttttttctgtggtggtggtgggtngggcttttgttctttgaaattttttttgctacatcacagtccagacatagtttaatgacantttatgggga

SEQ ID NO: 1440 - DNA, 626 bp, Homo sapiens
accaacattttaagtaatgaaatacttaatgtgatgacccattttcagataatttcatgactgtatcttcatcttaatttttaaagcagttgaccatgaatttcagtttcagttattctctgtttttatcaattccgtaatgatctgcagaatcttgtcattttcaagggacatctttggattttcaagcttttttcttaaaactgaatcaatgagaactctcagctgcttgaaaatgacagctatctttacaggggcctgaaaatagatccagccatcaatagaaagaagacgttctcggtgctgaacttctatatcaccaccaaaaagtaaaactggaaaaggggttattagggtagtttctctcaaatacactctggcataccttatctacatgggaaaaaggggggaaaataacttcaaaatataaaaatagaaggaggtcatttatctttttcaagtaagcatttttctacaatttgttattctacattttaagcccagagtatttgtaaagctacattttcattttcttatgtgcataatttatcaattttataataattactattaccacctgtgcattaatgctatgaaaggcattttaaatattattgctaaggctg

SEQ ID NO: 1441 - DNA, 507 bp, Homo sapiens
  misc_feature 480: n = A,T,C or G
ggaatggcatggaatggaatggactggaatggaatggaatggaatggaatggaatggagtggaatggactagaatggaatggaatggaatgaaatcaacccgatgggaacggaatggaatgcaatggaatggaatggaatcaacaggaaaggaatcaaatggaacggaatggaatagaatggaatggattggaatggaatggaatggaatcaaacctagtagattggaatggaaagaatggaatgaacaggaatggaatggaatggaatggaatggaatttaatgggatggaatggaatggagtgcaatttaatagaatggaatggaatggaatggaatcaaactgagtggaatggaatggaatggaatgcaatggaatgtaatggagtggaaggcattagaatcaactggaatggaatggagtggaatggaatggaatcaacgccagtggaatggaatggaatggaatggataataatngaatggaatggaatcaatccgggtgga

SEQ ID NO: 1442 - DNA, 279 bp, Homo sapiens
acaagccttccaagaaaagggacctgcgttattccctctcctgagcaagctgcccctgtcccacaaaccagttctatctgttttcacatctagagcactgtccataaacatgtccatcttggctgtgctccagtgagatgaactgaaagaaggaataactcataaagggacctttgttattaagaaaaattcttgtcttcccaaaggaatcaagatctcttcagagaaggagcaactgttggaaaatcagaagtgaccattccctaacctattcctgac

SEQ ID NO: 1443 - DNA, 268 bp, Homo sapiens
accttttcttcccatcaaaaatgcattaacaagatcatgcttatagttagtcagcacaagaaaaaaacgacaatttatactgaactatttaagtcttgcagtagagtgctcacaactccgagctgtatctgttaaccttttcaatagcattcattatgtgacattgtcaccaattacagtaagaacttcactaatttttgaaagctagaattactcaaaaaattctgcattgtaaataataccaggaatattgcatttaagcctagga

SEQ ID NO: 1444 - DNA, 390 bp, Homo sapiens
accaggaactataaaaacaaaaacttgttactaaagaaaatatctgaaatgtgataagttcttatgccatgttaatttcatgtgtcaacttcaacatttacatgtattatttcattatgtaaaatgttttagcaatttaatattttgcacagttagcaaactttgtatgtcatttccttcaaggcatcatgcagagttgacatgagatttataaggttttaagttgtttgcatgtgaaaatcaaatacatactttggtagtctttgaatacaaagtcatctgctcttgtttttcaagaattttgagacacaaagttgtatgtaaaggaatatattaatttgccgttttctaggtagatttactcaaaaagagtgaatcaacttaatatgt

SEQ ID NO: 1445 - DNA, 497 bp, Homo sapiens
  misc_feature 467: n = A,T,C or G
acttggcccgggtcacgcgtgggtcctctccgggctcgggagtagcatcctcaggagtagtgtagcgagcaaattctggaaagtagtcctcaatcttcgatttcccagcaaggactttctcagcgagcagatcttgcttgttgaggaacaggatcacagagatggtgcgcagccatctgttgttccagatgctcttgaagaggttcagagcctcctgcaggcggttggtctggttgtcctcccggatgaccatgttgtagctgctgctggccaccacgaagatgatggcagtcacatcgttgaagcactggatccacttgcggcgttcatcgcgctggccacccacgtcaaacatgtggaagttgactttgtccacctggaacttggtctcaaagattccagaagtcaggacacggcagcgaagcaggtcctgatcgctcggcacatagtcagcctgcttgatcacngtcgatcttgtccaggaagtacctcggccg

SEQ ID NO: 1446 - DNA, 358 bp, Homo sapiens
  misc_feature 354: n = A,T,C or G
tgaccatatgttctagtgtcttcttgcagatttaaatattttattgcagtgtaaagtttaatatttagatgtgtgatacatctttggataatctgtaattaaattgatcttttgtaatggtgatagtgattagcacacactgaaaatccagcaaagcaattatttttctctttttaactggaaatcatattcgtaagttgtggtagatattatcatcagtgtattcatgattcgatttatattttgtgttatctggttataaattttatatagcattcaatttgacaaaatataaatctatttgatttgaatttaatggtgtgtgtgtgtgtgtgtgtgtctggtgtgttcagnatat

SEQ ID NO: 1447 - DNA, 368 bp, Homo sapiens
actttccctgattctaattttaacactaggaaagtagcattataggccaggcgtggtggctcacgcctgtaatcccagcactctgggaggctgaggaaggcaaatcacgaggtcaggagatcaagaccatcctggccaacatggtgaaaccccgtctccactaaaaatacaaaaattagctcgacatggtggcgcttgcctgtggttccggccacccgggaggctgaggcaggagaactgcttgaacccaggaggcggagtctgcagcgagccgagaccgcgccactgcactccagcctgggtgacagagggagactctgtctcgaaaaaaagaaaaaacataagtccttggttgggaggaaagttgt

SEQ ID NO: 1448 - DNA, 160 bp, Homo sapiens
acttggctgaaggagagctggggggcagtggtgtgtctctatgggcatgggtgtggcaggaggacacaggggcagctgagagtggtatgcatggatgcgtctgtgtgccccgccctacaatggagccacctctgatcccgttgcttcctggcacttgggt

SEQ ID NO: 1449 - DNA, 504 bp, Homo sapiens
gcctctaagtctttattcttcacagtagataatgaaagagtcctccagtgtcttggcaaaatgttctagtatagctggatacatacagtggagttctataaactcatacctcagtggacttaaccaaaattgtgttagtctcaattcctaccacactgagggagcctcccaaataactattttcttatctgcagtattcctccagaagagctaaccagggcagggctggcatgagaagtgacatctgcgttacaaagtctatcttcctcataagtctgtaaagagcaattgaatcttctagctttagcaaacctaagccaaaggaaggaaagccacgaagaatgcagaagtcaaaccctcatgacaaagtaggcacaagtctacaataagctaaatcagaatttacaaatacaagtgtcccaggtagcattgactcccgtcattggagtgaaatggatcaaagtttgaattaaggcctatggtaaggtaacattgctttgttgt

SEQ ID NO: 1450 - DNA, 527 bp, Homo sapiens
ggagcccaagtataaagaacttggcgagaagctcagcaaagacccaaatatcgtcatagccaagatggatgccacagccaatgatgtgccttctccatatgaagtcagaggttttcctaccatatacttctctccagccaacaagaagctaaatccaaagaaatatgaaggtggccgtgaattaagtgattttattagctatctacaaagagaagctacaaacccccctgtaattcaagaagaaaaacccaagaagaagaagaaggcacaggaggatctctaaagcagtagccaaacaccactttgtaaaaggactcttccatcagagatgggaaaaccattggggaggactaggacccatatgggaattattacctctcagggccgagaggacagaatggatataatctgaatcctgttaaattttctctaaactgtttcttagctgcactgtttatggaaataccaggaccagtttatgtttgtggttttgggaaaaattatttgtgttgggggaaatgttgtgg

SEQ ID NO: 1451 - DNA, 218 bp, Homo sapiens
ttggaaacatttttgagatattaaagattggaatgtgttgtaagtttctttgcttacttttactgtctatatatatagggagcactttaaacttaatgcagtgggcagtgtccacgtttttggaaaatgtattttgcctctgggtaggaaaagatgtatgttgctatcctgcaggaaatataaacttaaaataaaattatataccccacaggctgtgt

SEQ ID NO: 1452 - DNA, 534 bp, Homo sapiens
  misc_feature 280, 434, 457, 483, 501, 507: n = A,T,C or G
aatgtatacagttcctaaatcattcacctcttttttttttttttttttgagacagggtcttgctgtcacctaggctggagtgcagtggtggcaatcatagctcactgcaacctcaaatgtctgggctcaagtgagcctcctatctcaacctcctgagtgagctgggacgacaggcacacatcacaatgacgaggtaattttttgtataggcaaagtttgccatgttgccgacactggaataatctcttcatttttttttatttttttgagatggagtttnactcttgttgcccaggctggagtgcagtggtgcgatcctggctcaccgcaaccttggactcccaggttcaagtgattctcctgcctcagccccccgaatagctgggaccacaggcatgtgccaccaggcccggctaattttgcatttttagtanagacagggtttctccatgtttgncaggctggtctcaaactcctgacctnaggcgatccacccacctnggcctnccaaatattgggactacaggcatgagc

SEQ ID NO: 1453 - DNA, 668 bp, Homo sapiens
  misc_feature 570, 595, 611, 621: n = A,T,C or G
cagttctggctcagggtcactcatgaggttgctgttgtctgaaatcttagctaaggattggaggatgcacttctaagtgaggcctggctgtaggcaggaggcctcagtccttccccaggtgggccaacccacagggctgcttgagtgtcttcacaatatggcgctcggcttccccccagagcaagagattcaagggcccagggtaaaagccaacgtgttatttttatccctagcctcagaattcacacgccgttgcctccaccatgctctggtttgatacagcccagctctgattggaaggggctggggctgcccgtgctgactcttcaaaggcatcccatcctgcagatggtgttcacagggagagtttgtgggggccggcactccctcatctactggggctcattctggaagaaggtccagaagaattggagacccctgcccctcacccaaactttggaggtggcagggtgaacagcaggccaagttcaggtcccaagacaggccaaggccagtgcggtttcccttccactgcctcagtttacctgtattcagaagacagtctagaangagttgagcagagttccctctaaangagtagggagctgatnacagtcccangccctcctctttctctatgccaaaatcatttccgttatcctgagatg

SEQ ID NO: 1454 - DNA, 262 bp, Homo sapiens
accagcttctaaagccatgatgccataggtccatttgttgatgaaattcctacccactgtcctcgggcatctgactctggtctctgcactggcatcaagagaacgctgctcggtggtttaaggctaacaccttacagggtaacactgtaacactggccctggagccaggtgcttttctccatgaaaacttccaccttggtagctcagccgacatagacaacacacaaagcgcagctctgcacttctgtccttatcttcacac

SEQ ID NO: 1455 - DNA, 250 bp, Homo sapiens
accaggtcggactaagccaattttcatggcctcataaatgccaagcttctgttttgtggtctcattgtatatgcctgctatgcagcttgaaccctggaggaagtccttaattctctcaccaacctcgtcataagaaatctgaccagattccagttcattgacagtggacggtctcaatataccagaatctaccagctcagtgacggtcacaggttgtctgattccttggaaggacatgcttctcttctgt

SEQ ID NO: 1456 - DNA, 540 bp, Homo sapiens
  misc_feature 130: n = A,T,C or G
acatgagtggctatcatactggctattatatggaaatgctggcatagagcagcactaaatgacaccactaaagaaacgatcagacagatctggaatgtgaagcgttatagaagataactggcctcatttnttcaaaatatcaagtgttgggaaagaaaaaaggaagtggaatgggtaactcttcttgattaaaagttatgtaataaccaaatgcaatgtgaaatattttactggactctattttgaaaaaccatctgtaaaagactgaggtgggggtgggaggccagcacggtggtgaggcagttgagaaaatttgaatgtggattagattttgaatgatattggataattattggtaattttatgagctgtgagaagggtgttgtagtttataaaagactgtcttaatttgcatacttaagcatttaggaatgaagtgttagagtgtcttaaaatgtttcaaatggtttaacaaaatgtatgtgaggcgtatgtggcaaaatgttacagaatctaactggtggacatggctgttcattg

SEQ ID NO: 1457 - DNA, 438 bp, Homo sapiens
  misc_feature 337, 384, 403, 423: n = A,T,C or G
ttgtaataaaaaaatcatgaaaagtatgccttgaacctgttggtaaattctaaaaaggaactaatttgaaagatttataaatcaaatttgttaagtggccaaactattttttatttgaaaataacaaaattctaactcgagcaaagctggttggaaagaaggaataactgccttttctaagctttatcagctaggaagcagataggaattaataattccaagaagagaagaagttttatgaaaagaaattgtagtcgtcatgctgtagagtctgagcagctcatctcggaggtttaaacgggtccatctcccccacagcagccacaacactggcagnccccacagagggtccccaggaggccattgaccacctggatggcgcanagaaccatctggattcctnctacgaccagcaggatgganaagagggtcagattc

SEQ ID NO: 1458 - DNA, 263 bp, Homo sapiens
acctgggctccaatggggcacctgccttttctgtccccagaactgggaatgctggctcctatgcccctaggagagggcttggtataaaagctactttccacgagccaagatatgaggcccctgtctggtgttgctgagttgggcaagaggcttctcttctttgaccccaagtctaaaatagctaagctagagattctccaggggccagggctcagagaactgttcctgttgctgataatgatgtgccatccaagaacaggggt

SEQ ID NO: 1459 - DNA, 421 bp, Homo sapiens
gtggaattttacacagcctgaggcatttttgatagagggcatagagtgtgtgaagagataaatctacattgccactcccagcccattctgtaacccctgccactgcggctgttcatttcagagtgggctgaggttccacagagcggctgaagagctgtgaatggtggttaattgcagtgatgttaattagcatgttataggaggtaagaagaggggattcacatttctctttttactgcttcaaacaaatgatctagatctttgctacataagccactggccacatgtggctatttaaatggaaattaataacaattaaagaaaaattaaagatcagttcctcgaccacactagctacatttctagcgcttgatagccacatgtggctagtggctgccatattggagaacatggatacagt

SEQ ID NO: 1460 - DNA, 483 bp, Homo sapiens
  misc_feature 430: n = A,T,C or G
actctgaggcttgtaggagggtaaaatagagacccagtaaaattgtaataagcagtgcttgaattatttggtttcggttgttttctattagactatggtgagctcaggtgattgatactcctgatgcgagtaatacggatgtgtttaggagtgggacttctaggggatttagcggggtgatgcctgttgggggccagtgccctcctaattggggggtaggggctaggctggagtggtaaaaggctcagaaaaatcctgcgaagaaaaaaacttctgaggtaataaataggattatcccgtatcgaaggcctttttggacaggtggtgtgtggtggccttggtatgtgctttctcgtgttacatcgcgccatcattggtatatggttagtgtgttggttagtaggcctagtatgaggagcgttatggagtngaagtgaaatcacatggctaggccggaggtcattaggagggcttgagagggcc

SEQ ID NO: 1461 - DNA, 248 bp, Homo sapiens
actccagatgctgggtaaggagcagctggatgtgctcagatggggctcatctgagaaggtggaggtaggaaagagggcagaagagagtaagccacttccaaacgtccctccaaaaaatctgaaaggagttactatgctaatgcgctgggcatgagtccgattcagaaccaatctggtgggcccctcatggctcagaaatactctgggtagggccggctgttactgcagtcgcggacgctgagttatgt

SEQ ID NO: 1462 - DNA, 535 bp, Homo sapiens
acaaagagatttgtgcggtaatctgcactttcagcctgattggctgcagggaactgtggcatccagcacctgtcagaatgaccaagcactcggcattcatctgtgcaattaacacactcttctggttcttgttcaagtggttggcttttagttgaagtagttttcatcttgagtgcctccctaacagacatgtcacagcaggagcctttgttagtgtcttggtcactgtcagcctgatcactgtccccgtgcccactgtctctcaggctggctctttctgggtccttaaacgtggagctactttgaacaaactgctgcctgctgcccatgtaattgggctctgcgggaaaattgtctgtctgaattatggacatccgagtggcaggggtctcgcttgcattagtcccttgtccggtgaagctggtgtggcagcccgcgtgcccctgagggacagtcaggttgttggaggccggtttgagatacatcacctccgaccggggcgagctgaggggcaggcgggtctggtagtcgaagt

SEQ ID NO: 1463 - DNA, 536 bp, Homo sapiens
  misc_feature 115, 284, 288, 301, 353, 379, 433, 463: n = A,T,C or G
agctttttttttttttttttttttttttttaatatctcaaaaaggaagccacttgcttgatatcaaaagtgctgtggaaagaaaggaggggaaaaaaacccacaaataaatgtanaatctagtttattttaccaaactgtatatttttccacttaacatttctacattagcaatgatgtaactctccaacatttccttataaaaaaggcaaacaagaagtgacaactcatgctccaaatattaaaaaatatatttaaacatatgatcaagaagatttgggccgngagnggtagctcacatntgtaaccccaggattttgggaggctgaggtgagtggatcacgaggtcagganatcgagaccatcctggctaacatggngaaaccccaactctactaaaaatacaaaaaattagctgggcgtggtcgtgtgcncctgtaggacccaactcaggaggctgaggngggagaatcgcttgaacctgggaggcggagtttgcagtgagccaagatcacaccactgcactccacactgggc

SEQ ID NO: 1464 - DNA, 120 bp, Homo sapiens
caggctcggaggggtctgcctgtcactgcgcccccgaccctagctcagggactgcagaactcaagataccatcccgtttctcctggctgaggaagggaagggaacatccacatcttctgt

SEQ ID NO: 1465 - DNA, 102 bp, Homo sapiens
acccttagtggagacgaagtttcaccatgttggccagaccggtctcgaactcctgacctcaagtgatccgcccacctcggcctcccaaagtgtcaggattac

SEQ ID NO: 1466 - DNA, 263 bp, Homo sapiens
cgagaagctcgcccggagaacggggaggaatatgctgtggagctcctctgccatataaacaaaaagaggaaatctttcaaacatggctgaagcaaagacccactggcttggagcagccctgtctcttatccctttaattttcctcatctctggggctgaagcagcttcatttcagagaaaccagctgcttcagaaagaaccagacctcaggttggaaaatgtccaaaagtttcccagtcctgaaatgatcagggctttggagt

SEQ ID NO: 1467 - DNA, 350 bp, Homo sapiens
acagggggaaatggcaaggaaaaaggagcgaggcctttggcgctcgttaggacagtggactattcagcaacaaaaaacccaaggcgaaatgaaagaaaatatcatatttctgaaatgtcctgtgcctccaactcaagagcttctagatcaaaagaaacagtttgaaaaatgtggtttgcaggttctaaaggtggagaagatagacaatgaggtccttatggctgcctttcaaagaaagaagaaaatgatggaagaaaaactgcacaggcaacctgtgagccataggctgtttcagcaagtcccataccagttctgcaatgtggtatgcagagttggctttcaaagaatgt

SEQ ID NO: 1468 - DNA, 502 bp, Homo sapiens
aattgttactttataaggtggttttattaacaaacccaaatcctggattttcctgtctttgctgtattttgaaaaacacgtgttgactccattgttttacatgtagcaaagtctgccatctgtgtctgctgtattataaacagataagcagcctacaagataactgtatttataaaccactcttcaacagctggctccagtgctggttttagaacaagaatgaagtcattttggagtccttcatgtctaaaagatttaagttaaaaacaaagtgttacttggaaggttagcttctatcattctggatagattacagatataataaccatgttgactatgggggagagacgccgcattccagaaacgtcttaacacttgagtgaatcttcaaaggaccctgacattaaatgctgaggctttaatacacacatattttatcccaagtttataatggtggtctgaacaaggcacctgtaaataaatcagcatttatgaccagaag

SEQ ID NO: 1469 - DNA, 593 bp, Homo sapiens
acaatgatacttatatctgcccctgaataaccatctgttttcctcccaagttcccgaaagtctgcttccgtgagactgttctgagtggtccctaggtgcagtttaaacattgctgctcgggcatggggttccggcaagggaatataaattcgtttctcaaatcttcgcctaatggcagaatccagaacccagggtatatttgtagctcccagaaccaaaattccatcattgtctacaccaaccccttgcatttgcactaggaactccgtcttaattctacgtgcggcttcactttcattttcacttcttgaaccacagagagaatcaatttcatcaatgaagataatggagggcttgttctctctggcaagttggaataaattcttaaccagtttttcactttcacctagccacttagaaacaagatcagaggaagatattgaaaaaaatgttgagttgttggcttctgttgctacagctttggctaagtaggactttcctgttccaggcggcccaaataataggattcccctccaaggtgttctcttgcctgtaaaaagatgaagaaatttaataggcagtatcacagcctc

SEQ ID NO: 1470 - DNA, 283 bp, Homo sapiens
accccaagctggcagctctgaaccctgagtccaacacagctgggctggacatatttgccaaattttctgcctacatcaagaattcaaacccagcactcaatgacaatctggagaagggactcctgaaagccctgaaggttttagacaattacttaacatcccccctcccagaagaagtggatgaaaccagtgctgaagatgaaggtgtctctcagaggaagtttttggatggcaacgagctcaccctggctgactgcaacctgttgccaaagttacacatagt

SEQ ID NO: 1471 - DNA, 279 bp, Homo sapiens; identical to SEQ ID NO: 971

SEQ ID NO: 1472 - DNA, 240 bp, Homo sapiens; identical to SEQ ID NO: 1295

SEQ ID NO: 1473 - DNA, 580 bp, Homo sapiens
gaaagtggcagttccttacagccctgctgctggggttgattttgaactggagtcattttctgaaaggaaagaagaggagaaggaagagttgatggaatggtggaaaatgatgtcagaaactttaaatttttgaaaaggcttctagttagctgctttaaatctatctatataatgtagtatgatgtaatgtggtcttttttttagattttgtgcagttaatacttaacattgatttattttttaatcatttaaatattaatcaactttccttaaaataaatagcctcttaggtaaaaatataagaacttgatatatttcattctcttatatagtattcattttcctacctatattacacaaaaaagtatagaaaagatttaagtagttttgccatcctaggcttaaatgcaatattcctggtattatttacaatgcagaattttttgagtaattctagctttcaaaaattagtgaagttcttttactgtaattggtgacaatgtcacataatgaatgctattgaaaaggttaacagatacagctcggagttgtgagcactctactgcaagacttaaatagt

SEQ ID NO: 1474 - DNA, 212 bp, Homo sapiens
acaatgttgttatggtagagaaacacacatgccttaaaatttaaaaagcagggcccaaagcttattagtttaaattagggtatgtttcaagtttgtattaatttgtaatagctctgtttagaaaaaatcaaagaccatgatttatgaaactaatgtgacataatttccagtgacttgttgatgtgaaatcagacacgcaccttcagttttgt

SEQ ID NO: 1475 - DNA, 453 bp, Homo sapiens
ctcttctccatcctgctggtcgtaggaggaatccagatggttctctgcgccatccaggtggtcaatggcctcctggggaccctctgtggggactgccagtgttgtggctgctgtgggggagatggacccgtttaaacctccgagatgagctgctcagactctacagcatgacgactacaatttcttttcataaaacttcttctcttcttggaattattaattcctatctgcttcctagctgataaagcttagaaaaggcagttattccttctttccaaccagctttgctcgagttagaattttgttattttcaaataaaaaatagtttggccacttaacaaatttgatttataaatctttcaaattagttcctttttagaatttaccaacaggttcaaagcatacttttcatgatttttttattacaaatgtaaaatgtataaagtcacatgt

SEQ ID NO: 1476 - DNA, 226 bp, Homo sapiens
  misc_feature 40, 129: n = A,T,C or G
caagctttttttttttttttttttttttcagctgctgcanaaaggcttttactgggcagacggggtgagtctcaagccagtggaccagtgaggggtgagggcacgtcctccgaaggagcaggggtccgnggcccttgctgtcacatctgccttggttgatctcagggaggttgatctctctcagggagaactgtggggtggggatgtagccttgggagggcccttc

SEQ ID NO: 1477 - DNA, 439 bp, Homo sapiens
actaaatgtcccaaagagtaagaaattagaactacctgttgtccgaagaccttaagcccaaagctatctgtgaaagtcctatagggattttgtaattctgtgtgtgcagaacacagttaaattattattattattatttttgagacggagttttgctcttattgcccaggctggagtgcaatggtgtgatctcgactcactgcaacctctgcctcccgggttcaagcgattctcctgcctcagcctccctaatagctgggattacaggcatgcaacaccacacctggctaatttgtatttttagtagagatggggtttctccatgttggtcaggctggtcttgaactcctggcctcaggtgatccacccgcctcggcctcccaaagtgctgggattacaggcatgagccactgcgcccggcccagtttaatgattttgt

SEQ ID NO: 1478 - DNA, 456 bp, Homo sapiens
acacatcagcatcacctggagggcctttttttaaaataagacacagattgctgggctcatggtcagagttcccagttaagtaaatcaggaaatttgtatttctaacaagtttataggtgaggccaatactgctgttttgggaactatgctttgagaaccactgccttgaaaaaatttccaacttctacctttaagatcagcctgacttatcaaacgctagagaaaaactgaatctacccttgggcagatgacttgggattggattctatacagcagtcttgctcaatcttcccagtttccagttttattataccaacaattggtttttacaagctagaagacaatgaatgtataagttctatggaacagtgagataaatctaagcttcttgtctttgtatttagaaacattgattctatggatgatcatttgtatcatgttgaccctttgacttgt

SEQ ID NO: 1479 - DNA, 223 bp, Homo sapiens
accaattaccaagtggtttgcaaaggagagtcgcattgggttgatgatgactgtgaggaaataaaggccgcagaatgccctgcagggtttgttcgccctccattaatcatcttctccgtggatggcttccgtgcatcatacatgaagaaaggcagcaaagtcatgcctaatattgaaaaactaaggtcttgtggcacacactctccctacatgaggccggtgt

SEQ ID NO: 1480 - DNA, 187 bp, Homo sapiens
acttacgtattgggattcctgtgtcttacagctctccctctccaaataatacacagaatcctgcaactttttgcacagctggtatctgtctggtagcagtgagaccccttgtcttggtgatccttactgggtttccaagcagaggagtcacatgattacaattgccagtagagttgttgtttggggt

SEQ ID NO: 1481 - DNA, 256 bp, Homo sapiens
ctcgcccggagaacggggaggaatatgctgtggagctcctctgccatataaacaaaaagaggaaatctttcaaacatggctgaagcaaagacccactggcttggagcagccctgcctcttatccctttaattttcctcatctctggggctgaagcagcttcatttcagagaaaccagctgcttcagaaagaaccagacctcaggttggaaaatgtccaaaagtttcccagtcctgaaatgatcagggctttggagt

SEQ ID NO: 1482 - DNA, 366 bp, Homo sapiens
actagaacgaacagtccccactagagacataatggcggttagcttcctgccaggcaccttctagctagtatctctctccagccaccaaatatcttaagaccaagcggcccttaccttctttcgtctgcgcattggtgatctgcaggtcgcagtcggcagctttcagcttctctctccccataatctgcttctttaagtcgcagagggagatgtggagcccatcaaaggtgacggtatcatagttgagtttagaggaaaatttataatgcacacaggacatggtgccaagggattcctaaggttcagcgaggagacgtggacactctcaatatacgtatatttataaactttaagagcaaaatatgt

SEQ ID NO: 1483 - DNA, 374 bp, Homo sapiens
acacgtggggtgcccgccttacaactcaccttcgaacgtgtccaccatgcggaagaaggcaagagagaaggaggacttcccactgccggtgcggccgcagatcccgatctggaaagagagaagcaggcaccgccactgggactctggggctgctgggaatagcctctatgctagctctgggtgtgtgtgcaggtgtgggaggtcacagggtatctttttggcctggttttctgactagtttctctttggacaccacaggtttgggcttgtttcctgcagtgggtccagagagggcttacacagggaccggcacgcaagtgcaggcatggatgtccacttgcctgggccttggtgtgggtctgggtgtgccgggt

SEQ ID NO: 1484 - DNA, 289 bp, Homo sapiens
actcagaagtcacttttaatatcaacgacagaaatatttcactaattcaactgaggcaaatttcctttctagacaaaggacctagaaattgagcatgcaaaacatccatccattcattcattcaaataattagccaattttaccgtcatttaattccaccagaagcaaatactagaatatctagaagtagtttgggtaaagaaacatttacattttaatattgtgtaatgtcataaatttggggctaaaataacaccaggtcaaatttgatccctttgtatgtgagggt

SEQ ID NO: 1485 - DNA, 315 bp, Homo sapiens
gtcctcatggccgccccgccggagcccggtgagcccgaggagaggaagtcccttaagctcctaggatttttagatgttgaaaatactccctgcgcccggcattcaatattgtatggttcattaggatctgttgtggctggctttggacattttttgttcactagtagaattagaagatcatgtgatgttggagtaggagggtttatcttggtgactttgggatgctggtttcattgtaggtataattatgcaaagcaaagaatccaggaaagaattgccagagaagaaattaaaaagaagatattatatgaaggt

SEQ ID NO: 1486 - DNA, 327 bp, Homo sapiens
  misc_feature 125, 173, 264: n = A,T,C or G
tttgaatatatccacattctattgaaactttgaaactaaaaatttagactcttatcgtcatcttaagttcttcatgctactcttaacctcccaaaaagcagtatctaagtcacatacatgatgtnttgggcattttctgagccatggagaactctgaaaggaagaatcgctgnttttctcaagcaaatcggtttcttgatgtcttttggttctccttgcctgctcctgatgcttggaccccttttattgatcagagtgctctanaataatggatggtcttggatgatggataaatagggacagggacagttaaattggagcctttct

SEQ ID NO: 1487 - DNA, 587 bp, Homo sapiens
acctgtaaacgtcaagttattctgaaaaggagtgggggagggggagacaaactcatcaaaagttcaaatagagtttaaatagataattttctatgtatgtgtaatgctgtctcacccttgatacaaagagcatgcatcgtgtagtggcagcagcactgaattcacgagtcaggaaacctgaacgggaggcttagctttgtcaggaccttttcctttccaagtctgttgcttattagctagaataaccttagacaattcttcccttccaattctaacatactataattctagggtttattttttatttttttgagacggagtttcgctctttgttgcccaggctggagtgcaatggtgcgatctcagctcaccacaacctctgcttcccaggttcaagtgattctcctgtctcagcctcccaagtagctgggactacaagcgccagccaccacgcccggctaatttttgtatttttagtagagacagagtttcaccctgttagccaggctggtcttgaactcctgacttcaggtgatcctcccgccttggcctccccaagcgctgggattataggtgtgagccactgt

SEQ ID NO: 1488 - DNA, 602 bp, Homo sapiens
  misc_feature 556, 586: n = A,T,C or G
acaaaatataaaataagtgatatttgtattatttaactgtttaaaaacaagaaggaatcacaattttagctagccataatcagaagcaaataatgggggcttgagaattgaattttcaaaggttctaaatggagatagacaaaatgtgtcagacatgtctttttaatcactctgtgtgaattactatacaaaggaaaattattttttttactaagaggaattctttagatcagtttaatgttatggtttggatcagtgttttctgaggatgtagaattggaagatttgatgtaattagcctatgaagttgagtagatgtattctatgtgcagttattactgattccatttcaagcagactatggacataagtctctttttaaaatgagtcccagaaaaattgtatttgattttaaaactctctcttgaaataattttatataaaaaagaattattgatagaatgctatcactttcctttcccggcctgaattctttgacagcatatactgtggtggaaattgatcaataatgaattcagacactgaatttgtggtnagaaaacaccatacattataataaatagtnacatgggctggtgttt

SEQ ID NO: 1489 - DNA, 354 bp, Homo sapiens
ggttcagtgagcttcaaggctcacaatggaagcactgtcatttccccagaaaagctgtgttccctatgctgaacacaccatacacattctcatctggaatctaaggagcagcttttaccctgatccagtatcctgaggaattttaagcctccactcaaatgacctgcctgtgttgtcatttccatgggaaagaactctttccacgagatctgctagttccaggcctctaagacaggaacgtatgtgccataagtgggtctacttcacagactcaatgaggcagaaattattgtagttttttcctatttcttctgcacccaactttctccttgtatttcaaaggccaggccatgt

SEQ ID NO: 1490 - DNA, 501 bp, Homo sapiens
acacagccttgttgccatgtctgttgtgggccacaatcgccttgtccttctgaattatgatttctggaaactcctgggccaggtgagtcacttgaatggtgcacttaatgtggagctgagctccttccatgatcattccggtggggctgatgtggaacttgggtgtagagaaggattccgtcacggtgaccagttcactcttggtagattctgaggtctgcatatggatcccagaaatgatcctagcttgacatcggaaggataaaacgcggtcctgttcctcaacggggaattccagtatcacaaaattctggtctcgagaattcttctctcttttcagcttgaccattttttcatttagttcaagtttttcaattgtgaagtgtattggggccttttcctctgggacagaacagttgaccctcacgatcccaccttggatggcctctttcttgtccagtgtcaccctgggactgggcactccttccaccaacacctggt

SEQ ID NO: 1491 - DNA, 248 bp, Homo sapiens
ccgcagcctgctaaaccggatcatcctagcccccatgaggttttttgagaccacgccccttgggagcatcctgaacagattttcatctgactgtaacaccatcgaccagcacatcccatccacgctggagtgcctgagccgctccaccctgctctgtgtctcagccctggccgtcatctcctatgtcacacctgtgttcctcgtggcccccttgcccctggccatcgtgtgctacttcatccagaagt

SEQ ID NO: 1492 - DNA, 391 bp, Homo sapiens
actgggcacagtcaatcagctggtacctggtgatatgaggcaaggacaggggagctggggcaggtgaggcaggcaggtggcatgaggagctgtgctgggtgggtgcggtctgagtggctcaggttgggtaaagggccagagacctgggtctacagggcagacatcaaggctgagccagtcagacagtgtttgtcaacactgggctctcaccaggctccctcaggccgaggtcagcagccagggatctgtcatgtgtgaggaaagtgtctgttcaggttaggtgtgtataatgcagcctttcagagccgcgtctgtctgaggtcctaggagctggaatcagacaggtttgtatggctgggtttctaggggaggcctgaggagccaagactgt

SEQ ID NO: 1493 - DNA, 442 bp, Homo sapiens
acatggagagcactcgagatgatagtcccctttacatctttgacagcagctatggtgaacaccctaaaagaaggaaacttttggaagactacaaggtgccaaagtttttcactgatgaccttttccagtatgctggggagaagcgcaggcccccttacaggtggtttgtgatggggccaccacgctccggaactgggattcacatcgaccctctgggaaccagtgcctggaatgccttagttcagggccacaagcgctggtgcctgtttcctaccagcactcccagggaactcatcaaagtgacccgagacgaaggagggaaccagcaaggcgaagctattacctggtttaatgttatttatccccggacacagcttccaacctggccacctgaattcaaacccctggaaatcttacaaaaaccaggagagactgtctttgt

SEQ ID NO: 1494 - DNA, 210 bp, Homo sapiens
gcattctagaattcatactggagagaaaccatatgaatgtaaggaatgcgggaaagcctttatgcttcgttcagtccttactgaacatcagagacttcatactggtgtgaagccctacgaatgtaaggaatgtgggaagacctttcgagttcgttctcaaattagtctacataagaaaattcatactgatgtgaagccctacaaatgtgt

SEQ ID NO: 1495 - DNA, 430 bp, Homo sapiens
gtatagggctgtgactagtatgttgagtcctgtaagtaggagagtgatatttgatcaggagaacgtggttactagcacagagagttctcccagtaggttaatagtggggggtaaggcgaggttagcgaggcttgctagaagtcatcaaaaagctattagtgggagtagagtttgaagtccttgagagaggattatgatgcgactgtgagtgcgttcgtagtttgagtttgctaggcagaatagtaatgaggatgtaagtccgtgggcgattatgagaatgactgcgccggtgaagcttcagggggtttggatgagaatggctgttactacgagggctatgtggctgattgaagagtatgcaatgagcgattttaggtctgtttgtcgtaggcagatggagcttgttataattatgcctcatagggatagt

SEQ ID NO: 1496 - DNA, 468 bp, Homo sapiens
cgctatgaggagggcctggtgcataatggctgggacgacctggagtttctcagtgacatcaccgaggaggacttggaggaggctggggtgcaggacccggctcacaagcgcctccttctggacaccctgcagctcagcaagtgatagcggaggcaccacgaagctgtgaactcagagcccctccctgctaccaaggcccagctatggccccagggttgaaaagttatgagggtcagggcagtatctctctgcctatttattggggtgcctatttattggggatctgcattccccgctgcccaatcatttgcaatgccctaattagggcatcctgcccctcgccttttaggctcaggacggaaggtcagttgccatggttaccgaggaccctggttactctggtgctgtcctgttttactggaccccgcctcccagccccaggggtgcctgtgggggtccattttgggt

SEQ ID NO: 1497 - DNA, 363 bp, Homo sapiens
accaagcaccaccgttggtggttccatctacaaagctgctgtcatcatcattcttgcgacatggtggccgattggggtcagacatggccgggttgaaagaagagtatgcccgggccaagctttggaaaatggcgtcatctggggaggagctgtattcgtgagcactaccactccgcgtctcatcatatggataattggccacaaggtctcctccatggagattggcagaaagcacaaaaggaatatccataatccaatgaatgacagccttggtctcaggagcaagctttgtgttttgatccacaattttcttcatatttttcaacagatgattatttggaccaccttctttctcattcacgt

SEQ ID NO: 1498 - DNA, 347 bp, Homo sapiens
tgcacaaagggcttggtaaagaccaactggggcggcaggggcggactcagggctttgcagggctccctgaggtctgatgggttacaagcaggtcctgaggtcaagtgtggggcttacctggcttcaatctggggtgtggttgagtgccccggccagggttcaaatcccaactctgccacttgctgactgattctggggaggagggttcctttccctttcggtgcctcagtttccctctctgtcaaatggggaaaacaatagcacccatctctggggctcttacaaagattaagttcactgcattattacatagaaagcatttagaacagtgcagccacatagtaagt

SEQ ID NO: 1499 - DNA, 363 bp, Homo sapiens
acatgacttgtaatatactataatttgtatttgtaaagagatggtctatattttgtaattactgtattgtatttgaactgcagcaatatccatgggtcctaataattgtagttccccactaaaatctagaaattattagtatttttattcgggctatccagaagtagaagaaatagagccaattctcatttattcagcgaaaatcctctggggttaaaattttaagtttgaaagaacttgacactacagaaatttttctaaaatattttgagtcactataaacctatcatctttccacaagatataccagatgactatttgcagtcttttctttgggcaagagttccatgattttgatactgt

SEQ ID NO: 1500 - DNA, 238 bp, Homo sapiens
acaagattatcttattcccctgcccaggtgtgagcacgtgctctcgctccctttcaggtttactatgtttaaaactaaactgctgcaaaagttctcaatgttcttttccaacacatctatatatatatggacacacagtcacgcaagctagttcccatgactcctggatctatgtgtatgcagagggctacatatacatagttgcttctttcctttcaattgagaggcaaagagctac

SEQ ID NO: 1501 - DNA, 543 bp, Homo sapiens
gaattggtgatatgtgcagctgttgttggatttttttgctgttctcttttttttgtggagaagttttagatcggttaggagtcggctttatgtgggacgagagaaaaagcttgctctaatgctttctggactaattgaagaaaaaagtaaactacttgaaaaatttagccttgttcaaaaagagtatgaaggctatgaagtagagtcatctttaaaggatgccagctttgagaaggaggcaacagaagcacaaagtttggaggcaacctgtgaaaagctgaacaggtccaattctgaacttgaggatgaaatactctgtctagaaaaagagttaaaagaagagaaatccaaacattctgaacaagatgaattgatggcggatatttcaaaaaggatacagtctctagaagatgagtcaaaatccctcaaatcacaagtagctgaagccaaaatgaccttcaagatatttcaaatgaatgaagaacgactgaacatagcaataaaagatgctttgaatgaaaattctcaacttcaggaaagcca

SEQ ID NO: 1502 - DNA, 494 bp, Homo sapiens
actaaggtatactactggacatttctatttttttaagtgtattctttttctgacttacagtaaaatttcaggaagttgatagatactaagaacttatgattggtctcagaggtaacaatgaaatactcataattttgtctgtggaactctggcagaattatgttacacatttggcgaagttgtctcttgtaatttatattttaaatgaaaaagtattttagagcttttaatgaaggggaagagtataaactttctttcatattcactctgtagttacagaccgtctcataaatcaagattgtgcattattagagttctcagagacagatacttccatatggacccctgttcatttttcttatttactagatattttgctaaatttagcacactagcaattaagagtttaaaaaagaagaaacgttataggaaagggaaactgaacagtaatgagtagctttgaaattggggaaaacacactagctgggttaggt

SEQ ID NO: 1503 - DNA, 387 bp, Homo sapiens
ccggcggacctctggtggacatggctgcttcccgcttacccccagcgacgctaacgttaaagcagttcgtaagaaggcaacaagttcttctcctctacagaaggattttgcaaacaattcggcaagttccaaatgattctgatcgcaaatacctgaaagattgggcaagagaagaattcagaagaaacaaaagtgccaccgaagaggatacaatccggatgatgattactcaaggcaatatgcagctcaaggagttagaaaaaacacttgctttagcaaaatcttaactatagcattattctgaaggattttcaaagtctccatgtgttttgttgcatttaggattaacaatggacaacacaaagcccagtcttactatttatatgt

SEQ ID NO: 1504 - DNA, 225 bp, Homo sapiens
acccagacttcagtgttgttgttctttataaaaaagtcatcattgcctttggcttcatggttcctgatgtgaaatacaatgaagcttacatttcatttctgttcgtccaccctgaatggagaagagcagggattgcaactttcatgatctatcatctgattcagacctgcatgggcaaggacgtaacccttcacgtctcagcaagcaaccccgctatgctactgt

SEQ ID NO: 1505 - DNA, 210 bp, Homo sapiens
acctgagtggagtggaaggtggagtcttaggttaatcagttactgactctaccctcaccctctttcaattgaggtaaactttgctgtttttctttttcataaagcattctcaaattgttgagtttattgctgaaaaaaatctccatgactttacagatagaattacaaactaaatgatgtcttgtatttagaagcagagtacctgcccgg

SEQ ID NO: 1506 - DNA, 401 bp, Homo sapiens
acccgcaccctgttggtgagggacccagctggcaggggtgctcagttcggacagggttgacccccctgttttttttaacctagtagctgctctttgcaaaggggctcccagccagggtaaggatctttcttggagggtctggggtttgctgtgggatcagatgactgcttacaggtaaggtgctcagggtcacaggggcagttatgcagcaaaatcaggggttacaatcagcagagacagaaactttcccaggaagctccctttctccccgtcccaggccaaaaactcctggggggctgagcatggatccaagtcactggtgggcccacctctggcccagctggcacccaggcctcaggtaagtgtggcctcctcactcagaatatcaccaaggagcaggt

SEQ ID NO: 1507 - DNA, 151 bp, Homo sapiens
  misc_feature 24, 91: n = A,T,C or G
acttggaaggatactgccctctantctaatggaatcaaaggggaaaagaaatgaacacccacgcccccagaagagtagaaacccaagtggnctcttggcacttcctgtatcgctccattcctgtctttcaccctgctctctctgggtcaaa

SEQ ID NO: 1508 - DNA, 531 bp, Homo sapiens
acagaaaaatcaaaacaagtttatttcatcacagacttctttctgtgaatcaaaggcattcagaactatgttttagagatcaaataatgtattctacaactatatacatacaaatctggtataccactaacacaacataggagttaattctattgatgaatatcatggctaagatatcctgatatactttggctacagaataaaacatgtaaagaactatgctcaaatacagttctttctttgctcagggtttagacaggtttccctctgaatcagaatcacagactcaacaatcacaaattcttctaaaactaagtgctaaacccatgaaaaaaagatataatgtttcttgccagaaattttgctatctttaaaatctatatggttcttagcctctattctgaaatacatgctatcattaactaatagataaactaaaaagaattagaaaaaaagatatttgccacgtgtatcttatatatgggttatgctatgttccactccaacctctccttccccacaagtaaattc

SEQ ID NO: 1509 - DNA, 525 bp, Homo sapiens
acatcagcctgaaaaggacttctggctatgcaagggtcccttaaagattttctgcttgaagtctcccttggaaatctgccatgagcacaaaattatggtaatttttcacctgagaagattttaaaaccatttaaacgccaccaattgagcaagatgctgattcattatttatcagccctattctttctattcaggctgttgttggcttagggctggaagcacagagtggcttggcctcaagagaatagctggtttccctaagtttacttctctaaaaccctgtgttcacaaaggcagagagtcagacccttcaatggaaggagagtgcttgggatcgattatgtgacttaaagtcagaatagtccttgggcagttctcaaatgttggagtggaacattggggaggaaattctgaggcaggtattagaaatgaaaaggaaacttgaaacctgggcatggtggctcacgcctgtaatcccagcactttgggaggccaaggtgggcagatcactggaggtcaggagtt

SEQ ID NO: 1510 - DNA, 486 bp, Homo sapiens
acttcctggacaagatcgacgtgatcaagcaggctgactatgtgccgagcgatcaggacctgcttcgctgccgtgtcctgacttctggaatctttgagaccaagttccaggtggacaaagtcaacttccacatgtttgacgtgggtggccagcgcgatgaacgccgcaagtggatccagtgcttcaacgatgtgactgccatcatcttcgtggtggccagcagcagctacaacatggtcatccgggaggacaaccagaccaaccgcctgcaggaggctctgaacctcttcaagagcatctggaacaacagatggctgcgcaccatctctgtgatcctgttcctcaacaagcaagatctgctcgctgagaaagtccttgctgggaaatcgaagattgaggactactttccagaatttgctcgctacactactcctgaggatgctactcccgagcccggagaggacccacgcgtgacccgggccaagt

SEQ ID NO: 1511 - DNA, 155 bp, Homo sapiens
actcaggggcagtcatcagagtgccaggtgcaccagctactttcacagggccacagatgaggtgcttctgtctgagtggagccttgtcaaccaacttccgccaaagcaggtccaacttctgttgctggaactcctcctcacagctaacaacatgt

SEQ ID NO: 1512 - DNA, 374 bp, Homo sapiens
atgaagtgtttagaataaaatagttatttccttatttttcccttggtggctgccctgtggaaacagtttagaatatttgttttgtgtgtaggaacctagttgtgttagtttacctgggtgttccacagctgatagtgattgccttgaataaattcaagggcaatttattcatttttactagggagatagacctttacagcaatcaagatatttttgtccatatccaggttagctggtaagaggatttttttggagaaaaaaaatgatatttagaaagttaatttctaattccggaatggaataaaaacaatatgagtagtgtaatcttgtagaaaaagagttgtataatcttgtagaatttctcattctgtggt

SEQ ID NO: 1513 - DNA, 298 bp, Homo sapiens
acccatccttttaatctacgaattttcctaatgtcaactgaacatttatagagcttttccactgttcttgtattttctttgctcgactgtttatcagttgtataggtgaagcatgctaagaaaggtctgtattttggaggtgatcgcatctttctgaaagaacacagcctgcaggactgggatctcagcagcagcttccacaacatggctgcaatctactagctagtttccaccgtcctgggacttaaatggactcattctatcttacagtctctccccacagatcttgtcctcatcc

SEQ ID NO: 1514 - DNA, 556 bp, Homo sapiens
  misc_feature 388: n = A,T,C or G
actggttctgtcacctgggctgctcacagtatttggggccagagcctacgtgaatatatgtgcgtggacagatcagctgccatgttggttttggcagaaaaactactgaaaggtggttcagaatctggggagccttatattccaggtgtctttttcagacagtttctacctgtatcacccaaggtgcagtttgatgtagtagtgtcagctttttccttaagtgaactgcccagcaaggctgaccgcactgaggtagttcaaaccttatggcgtaagacaggtcatttcctggtgagttaaaattccttgttctccttaagtcttgaagcagcttcatggatttcatgcctttgctcctctcattgtctttattcttcaccatttttcnccttcatgggtttctttatccctctttgagggtctccatcctgattatgtaatgcctatttctttttaggactccttctccctctatgattgctcttacacagctactgacatttatactttcgtgtaattcaagtcttctgcatattttccccttttgtgaacaggt

SEQ ID NO: 1515 - DNA, 478 bp, Homo sapiens
  misc_feature 403, 458: n = A,T,C or G
accttgcagcaggtcgttaagaatcatctcgaaaagcctctggccttttaaaaatgatcaaatttatttgaatcaaaggcactttacgttagcttggtggataaggaaattcatgatggcatcttttatttttccattcattatcaaattattttttctttgcttcctgcatccccacacccatcacacacacacacacgcacacatgcacatgcatacacagacacgcacacacatcacacgcacacacagccacacgcgccgcgcacacacacacgcatgccaggtaaccactctagctctgctgtgtatttagcatgcagtggtggagtggctatttctcatgagaccatccagaaccattgacttagtttagggcatctcaagaaacagcttctgtggncggggaggggaggggcaaagatattggggtctggggacaaagtaactgacacatngttgttcatctgtttctttt

SEQ ID NO: 1516 - DNA, 623 bp, Homo sapiens
acccagaccctccaaatccctgtcctgttggaaaaacagatgatggatgtctagaaaacacccctgacactgcagagttcagtcgagagttccagttgcaccagcatctctttgatccggaacatgactatccaggcttgggcaagtggaacaagaaactcctttacgagaagatgaagggaggagagagacgaaagcggaggagtgtcaatccatatctacaaggacagagactggataatgttgttgcaaagaagtctgtcccccatttttcagatgaggataaggatccagagtaaagagaagatgctagacgaaaacccacattacctgttaggcctcagcatggcttatgtgcacgtgtaaatggagtccctgtgaatgacagcatgtttcttacatagataattatggatacaaagcagctgtatgtagatagtgtattgtcttcacaccgatgattctgctttttgctaaattagaataagagcttttttgtttcttgggtttttaaaatgtgaatctgcaatgatcataaaaattaaaatgtgaatgtcaacaataaaaagcaagactatgaaaggctcagatttcttgcagtttaaaatggtgtctgaggttgt

SEQ ID NO: 1517 - DNA, 589 bp, Homo sapiens
acacacagttcctacccttgcctaagggtaaggaacaggagctgagctttctccccaaatagcaggaggcaggctgtgaaaatgccacaaggagagagaaacgtgccaacagacaccccttttgctggaaaccaaagacagcttcctggggaggtggcagtcaggctgaacgctaaaggtcagtccaaatcttaaggtattgatggggtagggaggcaggaaagctcacatctgggagtgtcctcattttaccagcacagcgggtctgagaggaccttattctgtgagcgatgcttttgaaggttttcaaagacgaccgtggcattgtcggacaagaaaacaaacagctgagtgtgtgtaaactcaagcttcctactcaacaaaaatatctctcaatgtatgtgctacagacttcgcagcaccaattctctgctcccttgactgagcacacagcagagggaaataaaccaatgctgaatgaatgaatcttgttggcctttcaagctctggctgaatagaaactccaagtctagcctcgccatgaacttaagttgttggaaacgccttcctcacttatgctggacttggt

SEQ ID NO: 1518 - DNA, 543 bp, Homo sapiens
  misc_feature 477: n = A,T,C or G
actgctgcagcgagccgggcagctacttcccctacaagcacagctacatgtggagcctcaggtcaaacttgtcagtgtcctaatcccagagaaagagcagaagcctaaaggcaagccaggaagataatgaagaaaaagatcattacttttcaatgacgtatgttccaaatacagcattggtgccttgattggactaggaattgctgcccttgttttactcgcctttgtcatcagtgtctgtgtcctttgctatttatttctgtatacgaaacctcaaagattagacactggccttaagcttcaacacttagaggcttcttccactcaagaaggcaagtcaaatggaaaaaccaaagccctcaattcaaatgcagcatcaaatgcaacaaatgaaacatactatgaagctgatgatataattcaagaaaaaacaatggatgcaacacaaatccacattgcttattaactaaaaattcngtgttttaaatgcttactggagagatgggacaataaaaataaagcgtgcacaaaaaaaaaaaaaaa

SEQ ID NO: 1519 - DNA, 555 bp, Homo sapiens
actcccagctactcaggtggctgaggcaggagaatcgcttgaacctgggaggtggaggttgcagtgagctgagatggcaccactgcactgcagcctgggcaacagagactccatctcaaaaataaataaaaaataaaaactcttcctcaagattttaagagcattctaaaattatgatacagaaaagcaatcctacaactactgtggccaaaacgtggattccaatgacctgccttgagcccgcggttgccaggagttggacctgcagtagtatgggaagctcacggcctaaataccgactgccctctgaccccaccgtccagcgattctagaacatttctagtaggaaagacatagcaagggattttcatgattgggaaatactgagagacaagctgaagatttgttaagggctatgcttctgtcatcttttaggtatttaaggctactcctttagctagctactttgagctgtttaaagtgactatctccctacacagagttacacaatgagcatctctgaaagagaatattaccctggatttccaaagatgt

SEQ ID NO: 1520 - DNA, 305 bp, Homo sapiens
accagctgtatttcatggaaaaaaaaagaataactcaaaaggcagaacgaagagcctagaggtcagagatgagaggcatgaataattattcacaggcgttgaatataatcaaatgacttgcaacatttaccactgggattttaaaatgtggtggaccaatcattcttttagtctgtgcattttcccatttttttcaacaggaatgtctagagacattattcctgttttgccactgtatttttggtgaatgtgtagtaagtaactggcctctttagtatcacaaagctggatgaagaaaatgtggt

SEQ ID NO: 1521 - DNA, 469 bp, Homo sapiens
actacagagcaaatttcaaatttttcattatatcagtctttttgaaaggatcaacttggataaaataaatatataatgctctatttgttagagctctattaaaaaggaaacagattccatagatctaagtcaatgtttctccagaagcatgattttgtctgccaaaagaaaatagctctctttggccaaaatgcaaaattacattgctataagaaaagttacaagggaaagtttgaagacacaaatgatttaattttggctcaaaaactgaatttgcttaacactgctacataatttgggtgaagtttccttctgcccgtttttcttgacctagataaatacactttgagaaatccagatctaataaatgtcagccaacattgacattgtaattgggtgattacaataaaaggtgagcagtttgttgtttattaataattagcttttgcaggtaatgaaatagcaggga

SEQ ID NO: 1522 - DNA, 385 bp, Homo sapiens
accaccttttagacacatgcagagggagaggagacaattcaggagtggtcttagggtttgggctttgagcaggcctagggcagagtcaaggctccggaccaaggggttcagtaactgtgggcagaagacttgtccagctcactgcgctgctccttctgggactctgtcaccacctccccattccgggtctcaatggtcttgatcagaaccgtcttccgactgtggctgtcctggggaggctccacctcaggcacagtcgtctttatatttaaggaggcaaaagaatggacgggcacggagatccggctctcctcgccctccagcagcttgcggtaggtggcgatctcgatgtccagggccatcttgacgttgaggagctcctggt

SEQ ID NO: 1523 - DNA, 585 bp, Homo sapiens
  misc_feature 14, 15, 337: n = A,T,C or G
acaagggccctggnnaccctcgaagcagaataaatgataggttgtctgtaattcactcagataggtataaaagttaaaactttaagcagatccctttagaaaaaggctctcttctaaaacgcacagtggaatgtcaagagtggcagggtggggagggggcagcgcgccaaaaaaatctgcaatcaaataatatcataatcttcataattaatataaataaataaagaataaataacaattactcataaatcaacatatacatttagagggaactgatagtcctacctcaacaaagatgatcaaaccaaaaagtcttacgtgaaacactgagacagtnactacagcatcttcggaacactcccttccctccccccacaaaacaatcccagacaacagttcaaggcatttgtggctatactaaagaaaactcttttttaagcaatttgatttgttcacatacaaaaaggtaaagccagactccagcagttcacaagccataataaagctaatcgtgtgggaagttcaatttacagcctgtgaaatataaaggcatttattcctcaagattcacccaaaacaacccgt

SEQ ID NO: 1524 - DNA, 437 bp, Homo sapiens
cggcaaccacggtgggagcggcggaggaaatggacataaacccgggtgtgaaaagccagggaatgaagcccgcgggagcggggaatctgggattcagaactctgagacgtctcctgggatgtttaactttgacactttctggaagaattttaaatccaagctgggtttcatcaactgggatgccataaacaagaaccaggtcccgccccccagcacccgagccctcctctacttcagccgactctgggaggatttcaaacagaacactcctttcctcaactggaaagcaattattgagggtgcggacgcgtcatcactgcagaaacgtgcaggcagagccgatcagccgggtgcaggatggcaggaggtggcagctgtaacttccaagaactacaattacaaccagcatgcgtatcccactgcctatggtgggaagt

SEQ ID NO: 1525 - DNA, 392 bp, Homo sapiens
atcctgcaatgttttcctactacttaaacatcaatatgtccttttttgaataatatatgaactgtgaatatgttaatttcaaaataacagtagcaatgtattggcttaaggttcgtctgtggaaaatcttttgggcaactcctcccattaactgagctaaaattcagtcctgtagtttcatacatggtcttggtgcttaaattcaggtctacaaaaataaaatgacctacatagaattcttagccaaaactggggaaaggattttgtctctgctgctcttcagaatgggatgcctgataatcaaaacaattcaagcagaattatgagacaacaggcgcaaaggcatgttcatgcccatgcaggatcaaactccttaggatcctctttcaaaa

SEQ ID NO: 1526 - DNA, 579 bp, Homo sapiens
gagacaaaaggacttaatcatctggccacctatcacttcagttctctgtataaatgaaatttaattctaacaaccttataaaaagaaggtccagacagcagaggaaacatcctgtccaattctaggttttcctcccttggcctcctttccccagcattgtctaccctggcccacttcctgcattctccccatgccctgctatttctgattctttgcttctcctagcgagatactttccttatatgatagctgctgagaagtttcccagaactgctagaggaaaagaagtggggaatttaggaaatatccctcactgacctaactccattatcttcactctttccttcttcctgccgcctcatgcccattctctttactgtctagcatgctgaaagaaggaagtgatctaaatgccagcgtgttcagtggtaaatattagttggtgcaaaagaaaaaccatgattacttttgcactaacctaatagctttgcaaattttaagaacttgctttatgaagatattcggatatggattctccccaccccacatacttagacattgttcaaatatactactttt

SEQ ID NO: 1527 - DNA, 335 bp, Homo sapiens
  misc_feature 203, 267, 293: n = A,T,C or G
acaaaggtcagcaacagtgaggacaattaaccaaggaagtgcaataatgtatacattccagaatatgtcgcttcaggcatgacacagaagcccttaaagcataccaatgcaggtaacacactcaaataaatacaccagcagcccttagctataaacaagttctgccttttttttttttttttttttttttttgagacggagtntcgctctgtcacccaggctggagtgcagtggtgcgatctcggctcactgtaagctccacctcgngggttcatgctattctcctgcctcancctcccgagtagctgggaatacaggcacctgccaccatgccc

SEQ ID NO: 1528 - DNA, 374 bp, Homo sapiens
acatctgacccacatggtggcaggacacaggggaagggctctcagagctggtgccaagtgtccaccaaagaaagtcccattcaccagagacaggctgtttccttggactccaccatctctgttacagctaccagccaggtctccatgatcttcctggaatccttcatgccagcatcagttcatgctctctgagcttgtcactcccgactctttcaagacccaggtcaactgccccatggctcacccacccaggccgcctccggagtcctgcagcacatctctttggtatgctgctgccctgctaccctcaagggcatggttgtgggtagggggagaacatcaacatcacattaccaaaagcaaacagcaggggt

SEQ ID NO: 1529 - DNA, 365 bp, Homo sapiens
actataatggatgtagacagcacaatttccagtgggcgttcaactccagcaatgatgaatggacaaggaagcactacttcttcaagcaaaaatattgcctataattgttgttgggaccagtgccaggcttgcttcaactctagcccagatctggcagatcacatccgttccatacatgtagatggtcagcgaggaggggtatttgtttgcttatggaaaggttgtaaagtatataacactccatctaccagtcaaagttggttacaaaggcatatgctgacacacagtggagacaaacctttcaagtgtgttgttggtggctgcaatgccagctttgcttctcagggagggctagctcgtcatgt

SEQ ID NO: 1530 - DNA, 569 bp, Homo sapiens
acttttcttgtattttttaccatatcactgtaaagaagaggggaaacccagccagctactttttttcatcactttttattcataacttcagatttgtaaaactaatttccaaaatataagctgttttcattagccagttctataatatcttcctgtgatttatgtagaaaatgaacacaccccttttccatttaagaccctgctactgtgtgaagagatgatacttacaaggagtgtcattacctgtgagctgactgaatgttggtaggtgctccattacaatccaggaaagtctgtgttactgatatttgtgtggaaatctttatttcacttcaatttaaccattagatggtaaaattaagatactacttgttggtaaaaattggtggactggtttcaatgggtaaatgtgttgtggcaaattaatgtgttggaatattgctctttgtgaatttgtgcttaagtcaatgaatgtgtagtatctccttctgacaagcattccctattgggattttaaagctatgtgcacagaatattagtctcttctacatgttttatttttctattta

SEQ ID NO: 1531 - DNA, 263 bp, Homo sapiens
accaaaaatacatttcttaaggttaaaagcatgcacttccatgcatacttgcttttggggagagtggggagaagacattctaataatcagtttgtgaaatagcttctgttggaaaccttttgaggggaataaggaatggtcatctaaaatgagagattctggattttaatgcagttcaaagttgagctgtatttttgttgttgatttatctggattttttttaaagccttctaaaacccagtgaattcaataccttaattagt

SEQ ID NO: 1532 - DNA, 618 bp, Homo sapiens
actgaatttgaaagattccaagcccttcccaactcaaagagtagaaacacatgcctccattttaaatcatctttcatttgtaaaaatacatatatgtttcatggaaaaaacacatttccatcaagctagagggaggattgctattttgcatcttttttgcaatgcacattctccaacagataatccacgtgtgaagtttttttgccctccttccacacaaatctgttattacctttttctttctttttaacttttaattgtattgttttgttttaatgcccagatagcacagcattcctcctttacttgccttttcacaagcccgtaatcaatatctgtaaaagttaaaattagtttccacagaaacattgatttcaaagcaaacactatcttaatgagcctaactctggtaaattaaaaatataaatggcactattaagagaggccaaggaaacaatacgtaatatttagcaggatctctaatattctaatttcagaagtgttaaactgtgtaacagttacaggacctatctttcataggcaaaaacagatccgtgcctcagtttccacatttatgaaatgtgcctgaaaattattttaagatcattgtagttctct

SEQ ID NO: 1533 - DNA, 599 bp, Homo sapiens
gtacaagctttttttttttttttttttaccctcagtaagtattttattgagatttaaagcacaaaataggtgaacaaatcgggaggaaggtggtaacacaggaatgggaacgtaaaagtcaaagtaggcaggactcaaactggccataaaggcactacggcatgttcataaacaccatcaagtaaaagaaaggggaatcaagatgttctcacttcttttctgctccaccttaatactccatctagccactggtatggagcatgtcatcaactcattcttctcacaagctagcaagggaattaaacattttatcagtcaaccctatgctcaccaagtgagccaatgttacacagtgattttgtgcatccagtgactgagaactacaggcaaggataggccctgactgttaataaattggtcgtggctattactagaaaattatgggtgcaggcatttacctatacaatgacctgcttactgtggcagctaacaatatagtcaaaccagtctattaccatatgatgtcctattaacaagagagcccagttgaaggatgtttcatacttttagaaagcctaatttcttactgtaatatcctc

SEQ ID NO: 1534 - DNA, 440 bp, Homo sapiens
cctacacatagtctatacatagatgcatattttacccccagccggctagagatttatttgttgtaaatgctgtatagatttggttttcctttctttacttaccctggtttggattttttttttttgaatggatttatgctgccttagcaatatgacaataatcctctgtagcttgagctacccctcccctgctgtaacttacgtgacctgtgctgtcactgggcataggacagcggcatcacggttgcattcccattggactcatgcacctcccggatggtttttgtttttttcgggggttctttggggtttgtttgtttgcttcttttccagagtgtggaaagtctacagtgcagaaaggcttgaacctgccagctgatttgaaatactttcccctgcgcagggccgtatgcatcctgccaagctgcgttatattctgt

SEQ ID NO: 1535 - DNA, 189 bp, Homo sapiens
acagtcatgattgctaaggcaatttgctaatctgccccgattgggcgtgtcctcagggcacatttgggaggttataatttgcaactatgtttattcagctacctccaatctttgcacagatccgaacccacaactccctgaagaacagaatactatgctttttagtcgggatgtctttatgaaagcagt

SEQ ID NO: 1536 - DNA, 523 bp, Homo sapiens
acaggacagagaagtgatcaatgtattggtctagtgagactgagatgaaaagaaataacctacagagtggtctgtaatgccttttggttggactgggaacaagtaaaaatttctaataaacattttgagacttccagaatcacttttgttatcttatcagaccatgggcctgctgagggttgagcagacagcctgcattctaacataccctgttcccaccccacggccattcagactgcactcaatacgctgaagtcgcttttgttgttgttgttgttgtttgcatcatttggatttttttcctgctttcaataccaaaaaatgcagatgctttaaggcctaaacagaattctgaagaatttaaaatatgcaattaaagtttgatatgttttgtctcccaagcaccttgttttttgttgttgttgttgttgttgaagtcagctgattttctctttagaaagagggtcagctagaaacctaggttttttggaattgtaaatttttttttagtatagtctggaga

SEQ ID NO: 1537 - DNA, 241 bp, Homo sapiens
actttcttctctcattccgccaaaatagggctcagttattcatttgccaagcttcgtggaggaatgtaggtgacatcaatgtgataaagtctgtgttctgagttgtcagatctcttgaagacaatatttttcatcacttattgtttactaaagctacagccaaaaatattttttttcttattctaaactgagccctatagcaagtgaagggaccagatttcctaattaaaggaagttaggt

SEQ ID NO: 1538 - DNA, 556 bp, Homo sapiens
gggaggagccgagctgtggatcccatctgcgtttttcccacagcaatacctcagatgactgtcatctccacactatttatagcaaagagccaggccaagcatggcactcaggtcctctaaatctgccactgcagctctctccacttagcaaaatctgaattgcagcctgtgagttaagacagttgtgtgggttggggtatcgtgtggagggagagtaacgtgtttaaaagcagaaaacatcccttcctgggagtcaccattttacagtattctcagggaagacctttgcagcaagcagcccagacatagcacactgcaaagcaatttctaaaaaaaatgtattttattgtcaattgacaatttgtaattgtatatatttatgtgatacaaagtgctgttatgatttatgaatacaatgtggaaaaattaaattaagtgaattagcatatcatcacctcaaatactttttgtggtgagaacgtttattttttagcaattttgaaatgtataatacactattattagctatattcaccatgctgtgtaacagagcttt

SEQ ID NO: 1539 - DNA, 238 bp, Homo sapiens
aatgcttataacctagtgaatatttctgctgagccttagttgtcttgtctaaaggaaaaaagagggaattgtagaataaaagtatttgttagtggaaattattgacctgaaaccatatcatattgttagtgtaactgaatgtatcagaaattgttcctatgtaggtattctgtgaaactggtttctaaaatgttacaggaaactgtttcctttttttttgtttgtttgtttaagtgga

SEQ ID NO: 1540 - DNA, 347 bp, Homo sapiens; identical to SEQ ID NO: 714

SEQ ID NO: 1541 - DNA, 424 bp, Homo sapiens
attaaggcttgtattctcctagaggaaaaacccaatgtcgtccaggactccattcaggcagtaacagttcagaggaagtgacacgctctaaatacaagtctaatgatacagctgaaacgttaactcagagggtcttttggagcaagtagttttcagaaagcgtctgctctctaggacggtaaggatcctctacaagggcacgtgcagatccaggcgctggagcgtcaggcatgggcaccattttcatgcttcaactcaaactccaggtggtagtgagctcaacggtccctcattccacaaaacatgacagcaaattcatcttctaaaaaaagttttgttttgtttttacccattcaacaggaaaaaaaattagacacacacgatgaaatttacaaccagcagcatcatccatcacactgtctgt

SEQ ID NO: 1542 - DNA, 615 bp, Homo sapiens
  misc_feature 595: n = A,T,C or G
acaaaagaagattccaccaccatttaatcctaatgtggctggaccagatgatatcagaaactttgacacagcatttacagaagaaacagttccatattctgtgtgtgtatcttctgactattctatagtgaatgccagtgtattggaggcagatgatgcattcgttggtttctcttatgcacctccttcagaagacttatttttgtgagcagtttgccattcagaaaccattgagcaaaataagtctatagatgggactgaaacttctatttgtgtgaatatattcaaatatgtataactagtgcctcatttttatatgtaatgatgaaaactatgaaaaaatgtattttcttctatgtgcaagaaaaatagggcatttcaaagagctgttttgattaaaatttatattcttgtttaataagcttatttttaaacaatttaaaagctattattcttagcattaacctatttttaaagaaaccttttttgctattgactgttttttccctctaagtttacactaacatctacccaagatagactgttttttaacagtcaattttcagttcagctaacatatattaatacctttgtnactctttgctatggcttttg

SEQ ID NO: 1543 - DNA, 323 bp, Homo sapiens
  misc_feature 36, 80, 97, 156, 200, 306: n = A,T,C or G
acaagcttttttttttttttttttttttttttttgnctcgatctgtcgcccaagctggagtgcagtggcacaatcttggntcactgcaacccccatntcccgaggctcaaccgtcagtgcagggcttgcctgatgtggacaatgtggatacctcanccctgagttgaacttggcatgccacctttgattccccatgctgnaaaaagaattggaacgctgtcaggtcctggcaccgtggtaatggctatatcctatttcactcacacacgtccttttaaagtctcccttcctcaagctattaaatanaaccctctagggatcct

SEQ ID NO: 1544 - DNA, 647 bp, Homo sapiens
acacccagttgccaaagttttgctgtctcttagagaaagaactatgaaatcaactgacaagaaacacattcttattgacaattgtgtataactggattgcagactgttcttactgtaactacttcctgattaggaatatgaccatttgactgttcaatgattatttgtatttacagtttccggagtttgtcattataataggaacaatctttgctgtatacttttaaaaaatactctgctatttctcttgctggaactgttgaaagaaaatatatagaatgatctattgctcatcagctttattttttaaacatacgacttattttgttgaaattgtcaaagactgtatttagatctcataatgctttgttaaatgtttacaagtaaatagtttgaattcagtaaatattattggttgttgtattgatcaatgcatgttacccattcaaccattttatagactaccaatttcttttatgttaactagaatgcttttgttaaaagttatttgttcattatttgtgctacccctttgattatgcagacaacctcatcagctgcctaacttatccatctttgaacttctgactacttgttgtatctgctggatatttagttcaactgtatagtttattacttctgtatgt

SEQ ID NO: 1545 - DNA, 409 bp, Homo sapiens
cggccgaggtaccacttttatcacaatggccttgcaaaggccaagagaagacgcagcctacaccacaagtagcagctggagagagaccccagggtaaagatggctttgcagcaggaaggatttgaccgaaaaaagcgaggttacagagacatcaatgagatcgacatcaacatgaacgatcctctttttacaaagcagtggtatctgatcaatactgggcaagctgatggcactcctggccttgatttgaatgtggctgaagcctgggagctgggatacacagggaaaggtgttaccattggaattatggatgatggaattgactatctccacccggacctggcctccaactataatgccgaagcaagttacgacttcagcagcaacgacccctatccttaccctcggt

SEQ ID NO: 1546 - DNA, 506 bp, Homo sapiens
ggaatggcatggaatggaatggactggaatggaatggaatggaatggaatggaatggagtggaatggactagaatggaatggaatggaatgaaatcacccctattggaatggaatggaatgcaatggaatggaatggaatcaactggtaaggaaacaaatggaacagaatggaatagaatggaacggattgtaatggaatggaatggaatcaaacctagtagaatggaatggaaagaatggaatgaacaggaatggaatggaatggaatggaatttaatggaatgcaatgcaatttaatagaatggaatggaatggaatggaatggaatggaatggaatggaatcgacccgagtggagtggaatggaatggaatggaaatgaatggaatagaatggaatggaatggaacggaaaggaatggaatgaacccgagtggaatggaatggaatggaatggaatggaatggaaaggcacggaatggaatggaatggaatggaatggaatgg

SEQ ID NO: 1547 - DNA, 404 bp, Homo sapiens
actcaacctaagttcggttccgatgaattcttatcccctgccccttcctttaaaaaacttagtgacaaaatagacaatttgcacatcttggctatgtaattcttgtaatttttatttaggaagtgttgaagggaggtggcaagagtgtggaggctgacgtgtgagggaggacaggcgggaggaggtgtgaggaggaggctcccgaggggaaggggcggtgcccacaccggggacaggccgcagctccattttcttattgcgctgctaccgttgacttccaggcacggtttggaaatattcacatcgcttctgtgtatctctttcacattgtttgctgctattggaggatcagttttttgttttacaatgtcatatactgccatgtacctcggcgcgaccacgct

SEQ ID NO: 1548 - DNA, 229 bp, Homo sapiens
acacacgactataaacattgttccctatgtaaacaaaaaaggaaacatataataagagatttgaaaagtctggacatttccttcccaacagatattaaaggcaacgtctttaatctaagacattatactgaaaggactatcatgttttaaagacaagatcaccgtctccacaggttttttaaaaattaaaaaaactatatagctgtgttaatcaaagcgcttattttgt

SEQ ID NO: 1549 - DNA, 542 bp, Homo sapiens
gtttgagagggcggggattgcgactctcacaccctgagctccggtgctcctttcctaactccactggctgcggcatctgtgggaaaagtgtggctgggtcttcgaggagccgcaccaatggcttccgtgctgtcctacgaaagcctggtccacgccgtggccggagccgtgggaagcgtgacagcaatgacagtgttttttcccctggatacagctagacttcgacttcaggttgatgagaaaagaaaatccaaaactacacacatggtgctcctggagatcattaaagaagaaggactcctggcaccatatcgagggtggtttccagtgatttccagtctctgctgctccaattttgtctatttctacacttttaatagcctcaaagcactctgggtcaaaggtcaacattctaccactggaaaagatctggtagttgggtttgttgcaggagtggttaatgtgttgctaacaactccactctgggtggtaaacaccagactgaagcttcaaggagcaaaatttaggaatgaagacattgt

SEQ ID NO: 1550 - DNA, 72 bp, Homo sapiens
actcgaagaagtgctctgagacctggctgtcccacaccatccggggcctgtggtccttcagtgtctggatgt

SEQ ID NO: 1551 - DNA, 472 bp, Homo sapiens
acaaaggaaagtgtaattaaatcaatttagctctatacttttcaacagccataagaaaaatgttgggaggttcaagatacgaaggctttcaattctgtataacagactttagcttaagtttctccgctctgaaataaattttcaataaaatattaacagtatgatatctaaaacaggtttactactgctcacatcaagttacatcctctgaccaatccttaccttccttaatgtcaaagaacaaatcatagacattaagctagagcttacctttcactgtcttctaaggcactgttctttatattctcaatgacataagatgctttacaagtatgaacaataatctgttatacacactaatggtatcctttcatttctttaaatctggaatgtagttccttgtgtggcatcttatttctaatgtagaaaaaacagctgttatcaagcacaaaattttaatctaaggatacca

SEQ ID NO: 1552 - DNA, 537 bp, Homo sapiens
  misc_feature 80, 109, 130, 166, 181, 261, 265, 325, 333: n = A,T,C or G
acaagctttttttttttttttttttttttttttttatctatgagttgtttattgggaaaaataattaaatgccctagganatattttttaattaccagtttcaaggcanacacttttttaaaaaagcatnttaacaaatatcactggggagggatagcattagganaaatacctaatgtanatgacaggttgatgggtgcagcaaaccaccatggcacgtgtatacctatataacaaacctgcacattctgcacatgtacnctanaacttaaaaaaaaaagaaacactggtttttaaaacagttccttctcgatgtatgaatgtntagatganaaaactcagttaatgatgtcatcaaataaaacaggcttttatatctgtcactggttcattgctcaagagttctttcttcaagatttattaaatacaataaatattacaatgtcacactttttttatttttttctcttcctctcttctcaatgccaaagtatatatatttcaatcctcaatcaatttcgatatgtggcatttttg

SEQ ID NO: 1553 - DNA, 309 bp, Homo sapiens
cgaaaacccacattacctgttaggcctcagcatggcttatgtgcacgtgtaaatggagtccctgtgaatgacagcatgtttcttacatagataattatggatacaaagcagctgtatgtagatagtgtattgtcttcacaccgatgattctgctttttgctaaattagaataagagcttttttgtttcttgggtttttaaaatgtgaatctgcaatgatcataaaaattaaaatgtgaatgtcaacaataaaaagcaagactatgaaaggctcagatttcttgcagtttaaaatggtgtctgaggttgt

SEQ ID NO: 1554 - DNA, 446 bp, Homo sapiens
acttaaactccagaaagaaaaagctaggaaacagaagtagagaggaatggaaaaaaacaaaaaaacccaatacctctgccatcttgccccatcataacccaaatagcatcaaagtggcagagatgggactaaagttaaagcaagcatcaaagttattacttttagggtaatgggatgaatttgaagagcactatgtcaaccaaatactaaacttcatggaataactgtgtttgtgtttctgtggaggagttgcggttttgtttgttttaatttggcccacgctgccccaatggaggaaattttaagataatcattaataaggcaacagcttccaggattaaaatacctataccatctatacggagttacaatgaggacaagacccacatagaccacaaaggaaaccgggaccagaagcttccagtgcattttcacagatcgttggt

SEQ ID NO: 1555 - DNA, 635 bp, Homo sapiens
  misc_feature 561, 624, 627: n = A,T,C or G
accagctactgccttgtgtgtcttcgatgcacatgatggggaagtcaacgctgtgcagttcagtccaggttcccggttactggccactggaggcatggaccgcagggttaagctttgggaagtatttggagaaaaatgtgagttcaagggttccctatctggcagtaatgcaggaattacaagcattgaatttgatagtgctggatcttacctcttagcagcttcaaatgattttgcaagccgaatctggactgtggatgattatcgattacggcacacactcacgggacacagtgggaaagtgctgtctgctaagttcctgctggacaatgcgcggattgtctcaggaagtcacgaccggactctcaaactctgggatctacgcagcaaagtctgcataaagacagtgtttgcaggatccagttgcaatgatattgtctgcacagagcaatgtgtaatgagtggacattttgacaagaaaattcgtttctgggacattcgatcagagagcatagttcgagagatggagctgttgggaaagattactgccctggacttaanccagaaaggactgagctcctgagctgctcccgtgatgacttgctaaaagttattgatctccgnacnaatgctat

SEQ ID NO: 1556 - DNA, 394 bp, Homo sapiens
acctattctggatattttcttttcttttttgagatggagtttcacttttgttgcccaggctggagtgaaatgacgtgatcttggctcaccacagcctctgtctcccgggttcaagcgattctcctgcctcagcctcccaaccagagacccacttctaaggccaggtcctgcctgggcttgagacggggagagcaggtggcaccttcagtggtcccttccctctacagcgacttcattgtgctatgacagcaggctccaggtccacagacagcccaggacacatgcctgccaggctgggtctccctgaagaaggtgttgaaggagttatcactgctccccagggccttgtggctgggcatggtgccactgggctggatgtcgtgctccaggcagt

SEQ ID NO: 1557 - DNA, 175 bp, Homo sapiens
acagaactccgcagtgaagtctaaaaaatcaagactcctctaacttacttggtcttggagtttggcttttcttacagtggtccccctgaagtaaatgtccatgtaataaagagatctcaagttcctcttgataacccacctgttttaaatcacaataggcacaccaaactcatgt

SEQ ID NO: 1558 - DNA, 541 bp, Homo sapiens
  misc_feature 479: n = A,T,C or G
ttctacctccaacggaaatgtttacaaggtcaagacttaattcaattcagacaagaccaaagttgcttgacttcaattcctgtgcattagtgtgatgatttctgtcacatagcagcattccgattctatgtaactgaatggagatgataagtgctttcccctctttatttaaaaaagattaaaaggaataaaagaaataatgtatggaaatatttccgttggaggtagaacatacacatttgactttttgtcaaataagggatagtaaacaatgattctgagatcctaataaattaaaggtattgtaaaggcattaaatatactttttaaaagaaaccaaagataaaaaggcacacagatgtttaataaattagaaagtgaaatgtaaatcttcatagttgaaatgtttgcatcttcagatcttcactggttttatttgataattttgaaactatgattaataatgagctcacattttnaactcttagtgtgcatgacaagctctgcaagtatctccattcactatggagttgtccatagt

SEQ ID NO: 1559 - DNA, 273 bp, Homo sapiens; identical to SEQ ID NO: 706

SEQ ID NO: 1560 - DNA, 323 bp, Homo sapiens
actaaaatggattctcagaatgtcaaaatttagaaatgtgagtaagtcaaatatctaatttaaaaaaatcaaatctgggctcattggccacttgatttctattttttcaaaacaatagctatctttttgagagcctattttatgtcaaacattttacataaatctatgacctcatttaatcctcataaaagcctgccaatttgataataaactaatccaggagaagaaataattttggcaagttagatggtagtgggagaactaagataaagcacctccttgaccccaaaaccaaaggcctccaatgatccctgcctcctggt

SEQ ID NO: 1561 - DNA, 303 bp, Homo sapiens
atattctgagcatagcagttggttcagtgcagtgtctgcttaccagtgcactgccagggtcagggatggctaagcctctcaccctaggagcgctgtggctcctacaattagcgcaggcccagagggttcagaagggacctcagggtgattctggttacaataaaaagcagaggggaggatctgttttcctttcctttcctttcttattaagggtatcaatttgaccataagacaaggctgtagtccagaacactcctctggggtgcggagcttggcagcttccctgccctgccctgcccttgt

SEQ ID NO: 1562 - DNA, 476 bp, Homo sapiens
acctcagtctaatcagactttttatgacctttataactacatttaaaacccttaattcctatttctgggtgtttgcgagcctgattgctatcatgaagtaaaaatttattactctaggtattcactagctaaataaacatagttcttgtttagcaagcatatgttgttcctcagctcttttctccagcttttgcagtgtcctggcatccttaaaatactttgaaaatatggccttgatccatggattaaatcagtatctaagtgaatgtgttgatgttttattgatcagatctatataagtgggaatacagcatatatctggatattcttatagttatctttttaacatcttatttttttcattaattacatatcaacattaattttgtatcttgaagcaaattgattttgtataattaaatgtgtcaagcatctgtattaattgatttgatggcataaggttatgaaaataatgt

SEQ ID NO: 1563 - DNA, 342 bp, Homo sapiens
acttggtatataatatatggacttcaggaactttattggggtggggggttaattttgccttaccctgttcactttcagatgattaggcttttgcactttagaatgagaaacttgtgacgttagtgtgttcttactagctttaatttgtatgtagcaatgaattgtgaatcttagtgcagtgggtttttttaaaaaactcaaaaagctgggaattaagtggtttcagtaataatgctataccgaggtgcttgcattgtatttcataattttgttacaaaccaaaattatttttaatgagaacagtcttgggttcagaggtgtgatgccagaatgtattttcgt

SEQ ID NO: 1564 - DNA, 538 bp, Homo sapiens
acgccgttccggaatcacgtgagaagaatgacctgggcattcagagctacagcagatggcaagtttataaaggagcagagtgacgtgtcctgcacagaaacacatgactgttgagaccgttatttaagtctaacgggcatttgcgttgcacagtgagttggagataactcgggggatttacaagtccagttgcttgaaagagtcaaattgattgtggccttttctttcgctgctcataaactattaccacccagttagctttatttatttgtggtgttaagaatcttgatgtgaccgaagaagtctgtggcatggtgccaaggcaggcccaacactgggaaaggactaatttttttgtatattgagagaaaagtttcacatagactggccagagttccgaagcacaactacagacagcgtcatgacagggcgacttggcaggacaccttgatccaaggcgacagcatttggcaaggacacggaagttgggtcgttgcatccatcatcaggagttgacttgttctgagcaactgaacag

SEQ ID NO: 1565 - DNA, 339 bp, Homo sapiens
acctctatgtttaaagaaagaagaaaaaaacccagaatttggttgtagaaaacaatgcccacaacagactggccagtgcttagacaaatttggggttggggggaacactttggtttgaaagcacagagcagtttgccatgtttcttctgtgcctaccattctcccttggcctcaacttctgtaagatgggggggggacaaaaagagaagtaaagttaagaagaaagtggaaaattaaaaaaaaagatgtcaaagtttttacatgcatatatttcagcttatgctgaagacctacctgtatgttgcacattgaatcatactttcagaacccctcagaaac

SEQ ID NO: 1566 - DNA, 535 bp, Homo sapiens
acaagctttttttttttttttaaaaagtttatagctatatagccataatgtagtatagcattgaaactccctatcttttggacctgtagattctatgaaaaatttttgtccaccaaattctaagagaaaatgtctttctgtatcttaggcacttaaggaaagcttcataaaagccattggtgttggactaggatttgaattgcagcggcttgaatttgatctatctccattaaacttggatataggccaagtttataaagaaacacgtttattcctggatggagaggaagaaaaagaatgggcatttgaggaaagcaaaatagatgagcaccattttgttgcagttgctcttaggaaacccgatggatctagacatcaggatgttccatctcaggatgattccaaaccaacccagaggcaatttactattctcaactttaatgatttaatgtcatctgccgttcccatgacacctgaagatccttcattttgggactgtttttgcttcacagaagaaattccaatacgaaatggt

SEQ ID NO: 1567 - DNA, 165 bp, Homo sapiens
acaggtcacttgaagacataaacattcttcttggttgagggatccacgcccttgtttcagaaatgacaccacagaaggctgtgagctccaggagcatgcgttgggatgtccggatgaccggggtttaaaggttttcctattctcgataaagcctgtgcgcactgt

SEQ ID NO: 1568 - DNA, 330 bp, Homo sapiens
gtctaggggtggcaagtgcttttccattcaatctaatacttccggattcctactaaaaaggaatacattaagagcatggaaaagttgcttactgaaaggaaacccccgaagagtaagggagggaatgtagaaattaagaagttatgtggaatactctttaaattgtaattaactacattttcttattttcacagtaatacaaaacacagtcacttgcagaactggttcagattacttaaataccagatacatttttagtcctctacataagtgtttgggagttacttatgtttatatgaaatgaagctattaatacttttctacagcagt

SEQ ID NO: 1569 - DNA, 160 bp, Homo sapiens
acagcctggcaaaagttaaaaggggtgtggcagctcccatcaggtctggaggtggtctataagcacagttgacagttgtgcattgggatgggtggagaaagacgacaagagagcagagaatctgctgatgtggctgcgcttacttttagtgactttatgt

SEQ ID NO: 1570 - DNA, 413 bp, Homo sapiens
acgcctggacccctgtgacttgcagcctatctttgatgacatgctccactttctaaatcctgaggagctgcgggtgattgaagagattccccaggctgaggacaaactagaccggctattcgaaattattggagtcaagagccaggaagccagccagaccctcctggactctgtttatagccatcttcctgacctgctgtagaacatagggatactgcattctggaaattactcaatttagtggcagggtggttttttaattttcttctgtttctgatttttgttgtttggggtgtgtgtgtgtgtttgtgtgtgtgtgtgtgtgcgtgtgtgtgtgtgtgtttaacagagaatatggccagtgcttgagttctttctccttctctctctctctttttttttaaataactctt

SEQ ID NO: 1571 - DNA, 511 bp, Homo sapiens
acttaaacttccacaagagtgaatttgacctaggcaagtttgttcaaaaggtagatcctgagatgatttggtcagattgggataaggcccagcaatctgcattttaacaagcaccccagtcactaggatgcagatggaccacactttgagaaacaccacccatttctactttttgcaccttattttctctgttcctgagcccccacattctctaggagaaacttagaggaagagggcacagacactacatatctaaagctttggacaagtccttgacctctataaacttcagagtcctcattataaaatgggaagactgagctggagttcagcagtgatgcttttagttttaaaagtctatgatctggacttcctataatacaaatacacaatcctccaagaatttgacttggaaaaaaatgtcaaaggaaaacaggttatctgcccatgtgcatatggacaaccttgactaccctggcctggcccgtggtggcagtccagggctatctgt

SEQ ID NO: 1572 - DNA, 482 bp, Homo sapiens
acttttattgctgggtaaattccattgcatggatatgccacattttgtttattcattcattggttgatagacatttgggttgcttccacttttttgctataacaaataatgctgctgtgaacatttatctatgagtttttgtgtggacagttcctttggatattattcaggaatagaatttctgggtcatgtggtaactatgcttaatcttttgaggagctgtcagactgttttccaaaatggctacaccattttacagtctcagcagcattgtatgagggtcccagcttctccatatcctcaccaacacttgttatcttttttattgtaactatcctaggttttgtgataaggatgcaaacagaaagctggaggtcttcagggacctagtgaatgaagttgtgtcctattttggcttgattttggttttccgtgtgcatagtatgacatgttgcccatgtttttatcttttgggatctgtc

SEQ ID NO: 1573 - DNA, 291 bp, Homo sapiens
  misc_feature 241, 278: n = A,T,C or G
agtcgtaacttgcttcggcattatagttggaggccaggtccgggtggagatagtcaatcccatcatccataattccaatggtaacacctttccctgtgtatcccagctcccaggcttcagccacattcaaatcaaggccaggagtgccatcagcttgcccagtattgatcagataccactgctttgtaaaaagaggatcgttcatgttgatgtcgatctcattgatgtctctgtaacctcncttttttcggtcaaatccttcctgctgcaaagccatntttaccctgggtc

SEQ ID NO: 1574 - DNA, 121 bp, Homo sapiens
acatatggacaagttcaaggcagtatggtctacttctgggaaggcctggattccatttgctcctgatggaaaaaccctagtcccagcagtgtttagaatgaactggagaaggcagatgggt

SEQ ID NO: 1575 - DNA, 394 bp, Homo sapiens
acttgttaaagttaacctcattcgtggtgctttgcttcagaaggattatttctggggcatgatgaggtgcaaatttctaatgaaagctttcccactttcaaggctttcatggggtttttagtgagtatgaattttctggtgtctaatgtggtgtgacttctggctgaaagctttcccacattcactgcactgataaggcttcttacctgtgtgtattctcaaatgcagagcaagggttgagaactgagagaaagctttcccacattcattacaaccatagggcttctcccctgtatggcttctcacatgcacagtgagagatgagctctgagagaaggcttttccacaaacattgcattcgtaaggtttatcacctgaatgaatcctcacatgt

SEQ ID NO: 1576 - DNA, 335 bp, Homo sapiens
  misc_feature 66: n = A,T,C or G
accactatgactttatccatgtaaaatagctatttattgaattttcttttaaaagctggatttacntgggtttttttttctctcagtttaaacatcttaacagagaatttgttactgtttattaaaagaattgcatttggaagcaagaaaacaaccggatttgcaatcatgtgaagaaacaataatgcctttattatcaagtgttaagcacaattcttataacaaactgtgataaattctttttgtttttttttcctttgccccattattttcttatgaacaaaccaaaaattcatggtgagcagttgcagtgttggctgatatatcttttatgt

SEQ ID NO: 1577 - DNA, 457 bp, Homo sapiens
gggaaatggaggattttactgaccactgaacagggatgtcactattgccagagaggaaaaggattcccccttggtagagtgaacatataagggaaagtggttgaaaattgaatcaggagacagagacctcacaccactcagaggtccctagagaactttactgacctagaaaaaaagataaacagggagaaggtcttcagttcttgtttggaatctgacactgaagcatcctcactcctcactctcttcccgaccccgagagtctgaaattgattaatactttttgtttaaaacttggcttgttgttttgttttttctttctgttttcatcaagggatctttattttacttttgtgtatttgtgtgttttccatgagtcatgttaattcttccatgtttaaactttttggcccagaggaatttatacatttaaattatggatttaatttcagaaggt

SEQ ID NO: 1578 - DNA, 478 bp, Homo sapiens
actaaatggtatccttagattaaaattttgtgcttgataacagctgttttttctacattagaaataagatgccacacaaggaactacattccagatttaaagaaatgaaaggataccattagtgtgtataacagattattgttcatacttgtaaagcaccttatgtcattgagaatataaagaacagtgccttagaagacagtgaaaggtaagctctagcttaatgtctatgatttgttctttgacattaaggaaggtaaggattggtcagaggatgtaacttgatgtgagcagtagtaaacctgttttagatatcatactgttaatattttattgaaaatttatttcagagcggagaaacttaagctaaagtctgttatacagaattgaaagccttcgtatcttgaacctcccaacatttttcttatggctgttgaaaagtatagagctaaattgatttaattacactttcctttgt

SEQ ID NO: 1579 - DNA, 230 bp, Homo sapiens; identical to SEQ ID NO: 989

SEQ ID NO: 1580 - DNA, 581 bp, Homo sapiens
  misc_feature 579: n = A,T,C or G
gtcagagtgtgatgctttccccaacatatcttcagatgagtcttatactttacttgtgaaagaaccagtggctgtccttaaggccaacagagtttggggagcattacgaggtttagagacctttagccagttagtttatcaagattcttatggaactttcaccatcaatgaatccaccattattgattctccaaggttttctcacagaggaattttgattgatacatccagacattatctgccagttaagattattcttaaaactctggatgccatggcttttaataagtttaatgttcttcactggcacatagttgatgaccagtctttcccatatcagagcatcacttttcctgagttaagcaataaaggaagctattctttgtctcatgtttatacaccaaatgatgtccgtatggtgattgaatatgccagattacgaggaattcgagtcctgccagaatttgatacccctgggcatacactatcttggggaaaaggtcagaaagacctcctgactccatgttacagtagacaaaacaagttggactcttttggacctataaaccctactctganta

SEQ ID NO: 1581 - DNA, 537 bp, Homo sapiens
  misc_feature 496: n = A,T,C or G
ggactaactgcaacggagagactcaagatgattccctttttacccatgttttctctactattgctgcttattgttaaccctataaacgccaacaatcattatgacaagatcttggctcatagtcgtatcaggggtcgggaccaaggcccaaatgtctgtgcccttcaacagattttgggcaccaaaaagaaatacttcagcacttgtaagaactggtataaaaagtccatctgtggacagaaaacgactgtgttatatgaatgttgccctggttatatgagaatggaaggaatgaaaggctgcccagcagttttgcccattgaccatgtttatggcactctgggcatcgtgggagccaccacaacgcagcgctattctgacgcctcaaaactgagggaggagatcgagggaaagggatccttcacttactttgcaccgagtaatgaggcttgggacaacttggattctgatatccgtagaggtttggagagcaacngtgaatgttgaattactgaatgctttacatagtcacatgat

SEQ ID NO: 1582 - DNA, 457 bp, Homo sapiens
ggatgatgctgttagaagagcttgcttcgcatttgtttttaaaaagcttttcatccttacagtgcaaattttaagatagaagaactccttatttcttaggattcctcataaactgtgggctatagatcttaaaaggcagggatcgaggaaggataatgtcaaattctgccataacacaaacctctataagagatatctcagaattccagtctatccagtggcctacttatttcacacagttccaattttacagaagaatatagctactcttttggagtaaaagtaaaaatctttgatttgcctttccaccagtccagtatccagaatgttatatattaataaattagtgaattctgttgcagagatagggagaaaggaagaggaactgctttagagtcagaatgataatttcaagaaaaactttgtcagaagacgttgctaaccattaaagagacgt

SEQ ID NO: 1583 - DNA, 552 bp, Homo sapiens
acatggggctaccccttccacgacggggattatctcaatgatgaggccttatggaacaagtgccgagagcctctcaatgtggttccctggaatctgaccctcttctccatcctgctggtcgtaggaggaatccagatggttctctgcgccatccaggtggtcaatggcctcctggggaccctctgtggggactgccagtgttgtggctgctgtgggggagatggacccgtttaaacctccgagatgagctgctcagactctacagcatgacgactacaatttcttttcataaaacttcttctcttcttggaattattaattcctatctgcttcctagctgataaagcttagaaaaggcagttattccttctttccaaccagctttgctcgagttagaattttgttattttcaaataaaaaatagtttggccacttaacaaatttgatttataaatctttcaaattagttcctttttagaatttaccaacaggttcaaagcatacttttcatgatttttttattacaaatgtaaaatgtataaagtcacatgt

SEQ ID NO: 1584 - DNA, 364 bp, Homo sapiens
acggcttgtagatgcaggctttgtttggactgagcctcattctaagagacttaaagttaaactgactattcagaaagaggtgatgaatggtgctatccttcaacaagtgtttgtggtggattatgttgttcagtcccaaatgtgtggagattgccatagagtagaagctaaggatttctggaaggctgtgattcaagtgaggcaaaagactttgcataaaaaaactttctactatctggaacagttaattctgaaatatggaatgcatcagaatacacttcgtatcaaagagattcatgatggtctggatttttattattcctcaaaacaacatgctcagaagatggtcgaatttcttcagtgt

SEQ ID NO: 1585 - DNA, 196 bp, Homo sapiens
caaaggaaaggattcgttttgtgattaagaaacatgagcttctgaattcaacacgtgaagatttacagcttgataagccagcttcaggagtaaaggaagaatggtatgccagaatcactaaattaagaaagatggtggatcagcttttctgcaaaaaatttgcggaagccttggggagcactgaagccaaggctgt

SEQ ID NO: 1586 - DNA, 97 bp, Homo sapiens
actattttggccaagtctgtagaaagctgtcatttgattttgattatgtagttcatccagcccttgggcattgttatacaccagtaaagaaggctgt

SEQ ID NO: 1587 - DNA, 525 bp, Homo sapiens
  misc_feature 522: n = A,T,C or G
acctctacagagttccctgtctatcttcttcaaggcacatgtcaaaactttaactcattaatgacttgtgcaattatttaatgcctgtctttcttaccagactgcaaacttctgggggatgcagagatggtatgtgtcttgtttaatgttatattctcctgttcctggaacacagtagactcttaacacaatttcttgaatgaaaagaataaatgaataagcagggaaagggagatttcctcttgacactgaacaaaataaagcgaggactgggcacaaatgtagataagctaaaaaagtaattatggtggcactgagattaaggaagaaatgggtggtttaggtaattcatgtcttgtagccccaattttcatgcattggcagagtgctgagagagggggatagtgtttgattagattatggctaaggcttgaaataactgctgaagggagaaggaagaggagaaagaaacttgattaagagttggtaaaagactgtttttcatagttgtgaggggacaanctc

SEQ ID NO: 1588 - DNA, 499 bp, Homo sapiens
acatgagtggctatcatactggctattatatggaaatgctggcatagagcagcactaaatgacaccactaaagaaacgatcagacagatctggaatgtgaagcgttatagaagataactggcctcatttcttcaaaatatcaagtgttgggaaagaaaaaaggaagtggaatgggtaactcttcttgattaaaagttatgtaataaccaaatgcaatgtgaaatattttactggactctattttgaaaaaccatctgtaaaagactgaggtgggggtgggaggccagcacggtggtgaggcagttgagaaaatttgaatgtggattagattttgaatgatattggataattattggtaattttatgagctgtgagaagggtgttgtagtttataaaagactgtcttaatttgcatacttaagcatttaggaatgaagtgttagagtgtcttaaaatgtttcaaatggtttaacaaaatgtatgtgaggcgtatgtggca

SEQ ID NO: 1589 - DNA, 553 bp, Homo sapiens
cagcgacttgtcgcacgcttttctatatacttcgttccccgccaaccgcaaccattgacgccatgtcgggttattcgagtgaccgagaccgcggccgggaccgagggtttggtgcacctcgatttggaggaagtagggcagggcccttatctggaaagaagtttggaaaccctggggagaaattagttaaaaagaagtggaatcttgatgagctgcctaaatttgagaagaatttttatcaagagcaccctgatttggctaggcgcacagcacaagaggtggaaacatacagaagaagcaaggaaattacagttagaggtcacaactgcccgaagccagttctaaatttttatgaagccaatttccctgcaaatgtcatggatgttattgcaagacagaatttcactgaacccactgctattcaagctcagggatggccagttgctctaagtggattggatatggttggagtggcacagactggatctgggaaaacattgtcttatttgcttcctgccattgtccacatcaatcatcagccattcctagagag

SEQ ID NO: 1590 - DNA, 165 bp, Homo sapiens
accagcgtgggaaggatgcacggcaaggcccagtgactgcgttggcggtgcagtattcttcatagttgaacatatcgctggagtggtcttcagaatcctgccttctgggagcacttgggacagaggaatccgctgcattcctgctggtggccaggtcacccgtgg

SEQ ID NO: 1591 - DNA, 247 bp, Homo sapiens
  misc_feature 152, 171, 203, 216, 230, 241: n = A,T,C or G
acgcctatgccaagtggaaactctgttctgcttcagcaatatgcttcattttcatgattgcagaggtcgtgggtgggcacattgctgggagtcttgctgttgtcacagatgctgcccacctcttaattgacctgaccagtttcctgctcagnctcttctccctgtggttgncatcgaagcctccctctaagcggctgacattnggatggcaccgancagagatccttggngccctgctctncatcct

SEQ ID NO: 1592 - DNA, 196 bp, Homo sapiens
caaaggaaaggattcgttttgtgattaagaaacatgagcttctgaattcaacacgtgaagatttacagcttgataagtcagcttcaggagtaaaggaagaatggtatgccagaatcactaaattaagaaagatggtggatcagcttttctgcaaaaaatttgcggaagccttggggagcactgaagccaaggctgt

SEQ ID NO: 1593 - DNA, 224 bp, Homo sapiens
tgcaaaaccccactctgcatcaactgaacgcaaatcagccactttaattaagctaagcccttactagaccaatgggacttaaacccacaaacacttagttaacagctaagcaccctaatcaactggcttcaatctacttctcccgccgccgggaaaaaaggcgggagaagccccggcaggtttgaagctgcttcttcgaatttgcaattcaatatgaaaatcac

SEQ ID NO: 1594 - DNA, 432 bp, Homo sapiens
  misc_feature 148, 149, 245, 246, 296, 297, 321: n = A,T,C or G
gtcctcgacaggacagaatctgggggcccctcagtaatccgtccctgggtcctccatcaagagccgcctgtccagtagaaataggatgcaaaccacgagtgcaattttaaaattaaaaaaagttaaaaagtaaaattgggccaggcgnngtggctcacacctgtaatcccagcactttgggaggccaacgtgggcagattacctgaggtcaggagtttcagaccatcctggccaacatggtgaannctcatctctactaaaaatacaaaatgatccaggtgtgatggcacatgccnntaatcccagctacttgggaggctnaggcaggagaattgcttgaaccctgtggtggaggttgcggtgagccaagatcgagccattgcactccagcttgggcaacaagaccaaaactccatcccaaaaaaaaaaaaa

SEQ ID NO: 1595 - DNA, 419 bp, Homo sapiens
acacaaaattttaaaaaatcataaatgaaattaatagattccagaattacataaaagaattagctctaatcaagaatttatatttgactgaatggtaaagaaatcaattatttaaatgccatggatctccaggctttcctaacccccaaggctagactttaatgaaaacttcattgggtaggtaaatcatagttaataggtgggactgcaaatggtatatgcagccatgttagcagaatgtttcctaagcattaaagcacctgtttaagtcacctatagccaaataatagaaatacaattttagaatcaagactaatatattaaagtaattccttgtttgatttttctataaatgaatagtatgagaatggaaggatagatgagacatttaaataagtatttttaagacactttcgtgt

SEQ ID NO: 1596 - DNA, 279 bp, Homo sapiens; identical to SEQ ID NO: 971

SEQ ID NO: 1597 - DNA, 444 bp, Homo sapiens
acttggtttttaaaaacccattttgttctctcttgtttcctctctatttcagcctagtatcagaaggccaggcgagactgcaacactgctcatcaccccgcggcgtgatccctgctcttaggtgctgggcagaggggaagggtggtcagggtgaggatggtgagggagggctggtgaggggctcagaggaatacttggaacaacagcagtgttattgtagtgtggcagtttcttttatacataggtgagagtttttaaagtgtaagggaaaaattaattttttaaaaaacaccatgcttggagggtgggggtagaaatagacacaatattatttctaaggaatcgggttttcatttactctggactggtgaaaatattttttaaagccagtgctctaagacctcagcttttatctcagaaccccatgggttccagaccaagagt

SEQ ID NO: 1598 - DNA, 269 bp, Homo sapiens
  misc_feature 100, 124, 164, 178, 239, 242: n = A,T,C or G
acctctacagagttccctgtctatcttcttcaaggcacatgtcaaaactttaactcattaatgacttgtgcaattatttaatgcctgtctttcttaccanactgcaaacttctgggggatgcanagatggtatgtgtcttgtttaatgttatattctcctgttnctggaacacagtanactcttaacacaatttcttgaatgaaaagaataaatgaataagcagggaaagggagatttnctnttgacactgaacaaaataaagcgagga

SEQ ID NO: 1599 - DNA, 273 bp, Homo sapiens; identical to SEQ ID NO: 745

SEQ ID NO: 1600 - DNA, 456 bp, Homo sapiens
ttgtcacattcttcttgggaattactgtgttgctgttgctgatgcaaagaagtctctagaactcaatccaaataattccactgctatgctgagaaaaggaatatgtgaataccatgaaaaaaactatgctgctgccctagaaacttttacagaaggacaaaaattagatagtgcagatgctaatttcagtgtctggattaaaaggtgtcaagaagctcagaatggctcagaatctgaggtgtggactcatcagtcaaaaatcaagtatgactggtatcaaacagaatctcaagtagtcattacacttatgatcaagaatgttcagaagaatgatgtaaatgtggaattttcagaaaaagagttgtctgctttggttaaacttccttctggagaggattacaatttgaaactggaacttcttcatcctataataccagaacagagcacgtttaaagt

SEQ ID NO: 1601 - DNA, 297 bp, Homo sapiens
acaaattctgagctgtctaacccctctgaaacggaatctgagcgtaaagacgagctgagtgattggtcattggcaggagaagatgatcgagacagccgacatcagcgtgacagcaggagacgcccaggaggaagaggcagaagtgtttcagggggtcgaggtcgtggtggaccacgtggtggcaaatcctccatcagttctgtgctcaaagatccagacagcaatccatacagcttacttgataatacagaatcagatcagactgcagacactgatgccagcgaatctcatcacagt

SEQ ID NO: 1602 - DNA, 280 bp, Homo sapiens
actaattatcacaaggtatacagacttagagcatctcaatgtaagcttgtagtgaccgttaggcagcttaaagaggaaaagtgacatttttgtgttcccgactttcagtggatgctgggccagtggtcggcaagagtcgacgtggcttggtgtttgtgactccatttcctcgggaagtctagggcctcatccagttgtattgagactgctattcatgctatctggtgttaatcctagagcaaggagcgacgtggggcctgaacgagatggcagcattggt

SEQ ID NO: 1603 - DNA, 482 bp, Homo sapiens
  misc_feature 419: n = A,T,C or G
acttttattgctgggtaaattccattgcatggatatgccacattttgtttattcattcattggttgatagacatttgggttgcttccacttttttgctataacaaataatgctgctgtgaacatttatctatgagtttttgtgtggacagttcctttggatattattcaggaatagaatttctgggtcatgtggtaactatgcttaatcttttgaggagctgtcagactgttttccaaaatggctacaccattttacagtctcagcagcattgtatgagggtcccagcttctccatatcctcaccaacacttgttatcttttttattgtaactatcctaggttttgtgataaggatgcaaacagaaagctggaggtcttcagggacctagtgaatgaagttgtgtcctattttggcttnattttggttttccgtgtgcatagtatgacatgttgcccatgtttttatcttttgggatctgtc

SEQ ID NO: 1604 - DNA, 273 bp, Homo sapiens; identical to SEQ ID NO: 745

SEQ ID NO: 1605 - DNA, 505 bp, Homo sapiens
accgcagaattgtgaatacaggctataaaaaattaatgcttattatttaccaattaaagacttatttttgaccacaccttaaatgtatttttgcactatgattttgcttccaggtgttcatacagaattgaataaatttctagattaacttgaacagcaaatatggattatgtgcaaaaacacagtcataacaaaagtttaacttttgagaaaacccctttaaaatggccagcattatacatatcttacaatatttaattccaagttcattttgagatggaggatgaataaagcaagactgccccctaccgactacagggacatggctcatgctacttaaaatgactacaaacaatatataaggcattattaatacatcacagacttgattgcaagagctttttcaaacattaaccactaatgattcaatgattacagaattctgcattaactattaaaattttacacctaggaacaaatagagagaaatgatcttttcaacagt

SEQ ID NO: 1606 - DNA, 427 bp, Homo sapiens
accctcaacaaagaacagtccatttttagagaattggcagagaaagacaaaggactttgagtcttcaggggcagcaacgaaatggcagagaaaggctggttattgaagcttgttcattctgagtcccgtgttccatgtcccaggcccatgtggattttctgctgtcttctgtgcttcacctctgttctcccagttggggaggtggggttcggattgcttgtgaatgtgggctcatcgttgctggtgtagctgcaggctgcaggctgtccagggcttgaggatttgctgatattctttcttttcttttctttttattttgagatgaagtctcgctcttttcccccaggctggagtgcgatggtgcgatctcggctcactgcaacctctgcctcccaggttcaagcaattctcctgtctcagccttccg

SEQ ID NO: 1607 - DNA, 547 bp, Homo sapiens
acgtcttccagtaaaaaaggacaatataaataaacatcttcaagaacctctcagggacgtctgcacgtctactgtggggcgcacagcacagatggacgcaggggctggggctccagggcagttgctgccacacccgccggggtcctaccacactacactcagaaacgtcacacggagttggaaaaaagccacagcttgctcagcttccgacaaagagcggattcacagtccgttcgatctcagagaagtgagtggggcacccacttcatggggccaaccccactaaaaaaaaaggcaacgcaaccaaaaactaaaacaaaaaccaaaaacccacacaacccccgatttttttgaaaactcatggctcgtggtcaaaaaagtaaatgcttttcaaaatgttttgaaaaccctcaaaaaaaaacagcacttccttaaaaagaaaagtctagtaacgaggccatcccggcgtcagaagcggtcaggctgggtttgacaagatcagaaccgaaatgactacgaaagcagaaaagcaagcattcccaaacag

SEQ ID NO: 1608 - DNA, 597 bp, Homo sapiens
acaatttctccttaatgttgtctcgggctttggcaaaatttagtttaaaggatatgagtagtgctttaaaaaatattccctccacagtctccatgccacctttaataacagagtcattctcttcttccttaaatatccttatcagaccttctaaaaggaagctgttattaatgaaaaccaaaagcagcttgtaagaggagaaattatgcagtgacggggggcggggggacaaccctgaacaaatattttctcttcataattggaagtggaagagaaaaagtgaacaggggatagaaataaaccaataaaatatgtaaaccaataaatatgtaaacagttttgcagaggctgatttatattttagcaagtctctctatcggctatgatccccaagttttctttttagagaaactatgatgctgataatagcagtttttacgcaaaagatattaatattcaatgatatttggtaatgcttgttcaaatacaggttgaacattcctcatacaaaaatctaaaatctgaaataccccaaaatccaaaactttttgagtgctgacaccaccacttgggtcgctaagatggtgacacctttgc

SEQ ID NO: 1609 - DNA, 589 bp, Homo sapiens
gctgaaaagaggaagagattaggggaactgttcaacccatactacgaccctctccagtggaagagcagccattttgaaagaagagacaacatgaatgacaattttctcgagggtgaggaggaaaatgagctgaccttgaacgagaagaatttcttcccagaatacaactatgactggtgggagaaaaagcccttctctgaggatgtgaactgggggtatgagaagagaaacctcgccagggtccccaatctggacctgaaaaggcaatatgacagggtggcccaactggaccagctccttcactacaggaagaagtcagctgagtttccagacttctatgattctgaggagccggtgagcacccaccaggaggcagaaaatgaaaaggacagggctgaccagacagtcctgacagaggacgagaaaaaagaactcgaaaacttggctgcaatggatttggaactacagaagatagctgagaaattcagccaaaggggctgactgtcattggagcggtgggcactgttaagaagcagccatcacatgatctgtttttcaccacttcactgaaagacaccatttatatacc

SEQ ID NO: 1610 - DNA, 555 bp, Homo sapiens
actctaatttagccaagtaattgctgctgtaaaatccaaatctacagagcgcacaattttttaaatggagtgtgcattcctcaagcaagactaaaaacaatcttacttgggtctctaatattaagcttcagaacagtttcgcaacttttgacctgaacaaatctcttatccataaaacaagaggaataaaagattgcatacgtgcatttaaaaagtaactttattactcccaggtcaaaaaaaaaaagggaaaagaaggagaaggggaaggatgagggggaggagggaagaaaggaaggaagaacaaaaaaagaaaaaagaaaagaaaagaaacagaaaggcactctatctacctatacctatatattttacttgtatttctaatcttggactatgtaattacttcattcacttgtgtgttttaattttcatggagagagaagagaaagaaagattttccagaaaaagcaaaaactgtgtgtgtgtgtgtctgggtgtgtatttaaataacataaacaaataaaaacagtgccacatacttattgccagtgcagc

SEQ ID NO: 1611 - DNA, 327 bp, Homo sapiens
  misc_feature 246, 319, 324: n = A,T,C or G
accatgtatgcttaaaatgaatgtatctacatttgttcctgagatacaggttgatggacggatggctacatggatgtgatggagatggtttactatcgggaccttccgcatcctgctgatgttttgttgcttaggatatgaatggctgagcggaggctgtaaaacctggcactctgcttgggtatgaggttcttcctgccatcctgccatcatttgttttttatgttttgtcgccaaaagtgaccntgaggaaccctgggagctcaggaaggaaggagcacccagaagcagggacagggagctggttggggaggaccanaaatnagg

SEQ ID NO: 1612 - DNA, 275 bp, Homo sapiens
acgatacgctttggttaaaacgttggacacagctcataatgtcttccaccgtcagttcattctgtgctcgttcaggtgcgtggaagctatggttctgcagacctgaaaatgatgggcactctcaaatgtttctggaaatacttagaaaaatatcttataagattaaaaaaaagaagaagaagaaacattttgaggcatctacatggatcacacaaaggaaactcaataaacctataaagttaaaactgagctgactagttatttgcagtgtgagt

SEQ ID NO: 1613 - DNA, 202 bp, Homo sapiens
  misc_feature 193, 194: n = A,T,C or G
ggatctcctatttttctttaaatacaaaaaaaaaaagataaatgaactattctccttgtaaagctaaattccccattctgtctaataaaggaagactgaaaaaaggttttaaagaacataaatggaaagatacaaatgctttgaaggaataaacgaaatgttaaaacagggtcaatccatttgaagaaaaagnnggacaaaa

SEQ ID NO: 1614 - DNA, 397 bp, Homo sapiens
  misc_feature 370, 371: n = A,T,C or G
caatcaacaagtggataaagaaactgtggtataaacatattatggaataccactcagtcataaaaaggaatgaattaacagcatttgtaatgacctggatgagattggagactattattctaagtgcagtaagtcaggaatggaaaaccaaacatcctatgttctcactgatatgtgggagctaagctgtgagaacacaatggcataagaatgatataatgggcttaggggactcgggggtaagagtgagagggggtgagggataaaagacaacatatatggtgcaatgtatactgctcaggtgatgggtgcaacaggatctcagaaatcactgctaaagaacttacttatgtaaccaaataccacctgnnacccaataacttatggaaaaataaaa

SEQ ID NO: 1615 - DNA, 463 bp, Homo sapiens
actgttttcttctttcagtcctggtggtttgtggcaggtggaacatcaagttggcagcacaccgaattctgagaatgaaaaattcttaggatcagcaccttctttgacaagtggcagactcctgagtcttcccattgaaaaataggactggtaaaggagaaaagaacacattctgtcctgtctctatattttaatgttcacctctttgaacgcaacatggtttttggtaaagataaattcattctaatttaacatgatatttcaaacaggaaatttggctgagcacatcgatccccaaacatcaactgtaactgtaaagcaacagaatatcacatcagtaatctattgcacttggtgaagaaagtaaattcctcctttgtctcccagctccagaaggcaatgtgtctcgttggctgtgcaagctcttctcactcaagcccgagtttctatgttcagacatagt

SEQ ID NO: 1616 - DNA, 230 bp, Homo sapiens
accatttaggaaataccgatgcctttgtgggggcagaatcacatggcaaaagctttgaaaatcataaagatataagttggtgtggctaagatggaaacagggctgattcttgattcccaattctcaactctccttttcctatttgaatttctttggtgctgtagaaaacaaaaaaagaaaaatatatattcataaaaaatatggtgctcattctcatccatccaggatgt

SEQ ID NO: 1617 - DNA, 249 bp, Homo sapiens
acaaaatagaacaacaaaaaaagggcagagaaaaggaaatggccccccagtcccccggcccaaggtgaggggcagccaggtcgggtgggtaatgagaaggattagacccagctgggggttagacagctacctgatggggattgttttgtctgtttttctgttttttaaacttaaaatatatatttttctgtatatgtttatattctccattgagcacctgactacactacagttacacgcacgcccccg

SEQ ID NO: 1618 - DNA, 310 bp, Homo sapiens
actatttttaatgggtgtgcatgtcaggattttctttagaaatacactggtctggtctaatttatttaagcaggagcactttaaagtatcccaccctaccccattccacccccagtggacagaaaggaaattgactgacttgaggggatgcagacatctgggttattccaacagaccagtggttaggaggagggggtgggtagcattatggcctcgggcaggcccccccaccctgagcctctgaaagctgactttatctgtaagagggaggtcaggctcgccttctcaatagcgtgtatttggatgagat

SEQ ID NO: 1619 - DNA, 496 bp, Homo sapiens
  misc_feature 128, 159, 235, 313, 324, 341, 370, 490: n = A,T,C or G
acaagctttttttttttttttttttttttttctttgagttaggagagagaaatcatttaatgtggtaagccagtaagatttaagagctgtttaacatactattttgttatgttatgagtagcattcanattgcagatccagcttctgaataagctcaanaactttaacttctatccctatggcctatgcccaggggaagatgggacttaaagggtgtttgtagaaatcatggtanaaaaacttacatacatatgtgtatatatatatagatacaaaaaaaaactatacatatttaaaaatactgcaaggttgnggtttcctgancaggatggattgggcanacaaaatcagcaatgcccctgctcctganagaggcctcgccatccctgttccataagtcttgagtctgcactggttctctgagtcatattggatccctgatcatctgcagcctggtgtcctaagagcaagccacatagctggggggcanaggctc

SEQ ID NO: 1620 - DNA, 360 bp, Homo sapiens
acagatcattattttccagaaaaagtgacccatgaagttggctggggcgggtgtggagtgttatgtcatgggacggaccttgggatgagggcgttaatccatgggcccctctgagatcactttaaacattttggtaagactgcccaggctgatgaagggctggagcgtgtgttaaaaacaagggctagtgttggttaaaagggatctttggcaagtgggaaactgctcgccactgcagaatttcttcagaccaaggaagggactgaaacggacttggaaaactaaagcaaaaccatgactgccgggatggtctcgtgtggtgattctgcaagaaataatcaccagagcgaggggacaggt

SEQ ID NO: 1621 - DNA, 489 bp, Homo sapiens
acggaggcagtgtccagggacagagtcacctttgttgcagcctatgagtctatcccctgcttctctaccactgtcccacacgcatcctgcccctcagcttggctgcagaagagcagggttccacgatctactcttctccacatccttgagtttttcacaagcggaggacaagatacagctccctgcacatctcctcccaccaaatcgaacagacacagcttcctgtagccgctaggtgagaatggatcagggctggaggtggcaggtttacactcactgcctgatatctggaaggaggtcacatcccacaacccacctcccctacttgctgcaggggagaatttcctgtctgcacaggcctgagctggggatcacataccaccttggaaagcaaagtgaggaaagaaacagagtagcagcagttagaatcccaccaaggggctgctgtcctgctttggatatcaggggaagccttgggccacccttgca

SEQ ID NO: 1622 - DNA, 502 bp, Homo sapiens
tttgagtttatgaacagaaatagaaagtatggtgcttgggttttgccctttcttactcctgaaagttaaatcagaagacactgatttcattttgtgaaatttagctcagagactattgatcttttgtttcattaatatgaacaactattagtaaaaaatagctttaacagcatttctgctgatatctagtaatctattcttttaatgtgaaaataagataaaatgtcctggagctaattctagcttaaatttgccagtatttctgtatgtcattaagtttttttcctctaaggttggtaatagaattttgttaatctttgcatacctgatggcatctatgtcaatgctgattgggtaattataaattctgtgctaatttaaaacttaatttgcctcttaaggtgattgtcctctgagtaatgattgtagttaaatgaagtatagcttgcaactatactatcacatgggtcgttaagtaaaaataaataaaccaaatttgtct

SEQ ID NO: 1623 - DNA, 499 bp, Homo sapiens
acacagttttattggtgcaaaactaaacaaatccaggaaggttattcatataagaatcttcaacacaaattctgcctttatttacaaaatggtctgataaaatatcgccccccccccatacttacaggtctcttccacaacacacttcacacgttgattttagcaatattaatagcaccattcgtatattatttaaaatcaagaagatttcatttcagttactatgttgattcatcatcatttacatccatggatgagataagtgagtatactgggactatctgctgctccatggtaaggattcctgggtccagcacaaaaggctttgcagttaccagttatgaaaggtatctatggtaagtagatactatgagaattttcgtgccacaaagtttaataatcctccatgtttgtataatgttatttccacatcatcttcaaacgaagcaatcacgctgaatacttttccagtgcttgtctgtatattcaatgtaattcc

SEQ ID NO: 1624 - DNA, 554 bp, Homo sapiens
tgcagagtatctggaaaagctaaagctgggttgttccccagccaatggaaattctacagtcccttcccttccggataataatgccttgtttgtaaccgctgcacagacctctgggttgccatctagtgtaagatagagagaactgggtaggcctctcccaccatgtgcagtctcatggggagaggcttctttcgtttcctcgtcaaacatctgattgacgcttgcaaactgtctgaatttgccatgcaaggttttcaaacaatttgcatgtttttcagatgctttcaaatctttttttaaaaaaatagtgtaaaatattttaataagccaaagccatgtggaatttttgtttagatgccttaactgtgccacaccccacaaccccctatattattttggttgtctatttctcacagcatattttcagttttttgtccatttgacatcagtctgtggtttattttgtcatcagattacttgtgggtatacctaccccaaaattgttttctcattcacagcattagcatattcagcaaatccatctgtggtgggaa

SEQ ID NO: 1625 - DNA, 540 bp, Homo sapiens
acagtggtgtgatctcagatcacttgaacctgggaggcggagcttgcagtgagccaagattgtgccaccgcactccagcctgggtgacaaagcgagactccatctcaaaaaaaaaaaaaaatcgtatttctacacacttgcaatgaataatcaaaaatgaaattaagaatattcataatagcatcaaaaagaataaggtgcttaataacatatttaacaaaaagtgcaaaacttacactctgaaaactacaaaacattgcagaaaataattaaagaagacctaaataaatggaaaaacatcccatgttcatggatcagaagagttaatgctgttaagatgacaatattcctcaaacttgtctgcagattcagcataatccctgtcagaatctctgctgacatctttgcagaaattgacaagctgatgctaagagttatatgaaattgcaagggacccagaatagccaaagaaatcctgaaaaagaataaagtagaaaaacccacatttcttcattttgaattacaaaacaatagtaatta

SEQ ID NO: 1626 - DNA, 523 bp, Homo sapiens
actttgtggataagaaaatggaggaacacatctgatggagagtgggcatttgacaacaatggaacaggtaaccagcatgtaaaatcaaaatataagtgtctttttaagagctgaaagctgctgctggtcattcattaatgtgtcagacatttaatcaggatgctggaccttcaaaataactgaaaaaagaaccaagaaaaggcgtttttgttttcaacaaactttactaaataaccctggaaaggcaatgaacgatctgacaatttaagctctaatgatttaaagctcagctagaagaaagtgaggcatgacatatactgtcaacggagggtgaaggaggcagatttctggaaatgcaatgatcccacacatttgcttcaaggagaaacctgcagacatattttcaggtcttgctaagtaacaactgtttatttgtaatcaatacatttgggaaagtctgctatgtagctaaggtcactgtgaccacagaacaacagatgaaaaggaaaaagcactgaacagc

SEQ ID NO: 1627 - DNA, 377 bp, Homo sapiens
acattataacaaaattaaaatgtcttatttaaggtgacagcaaattttgttactttctatgagctgatatttcagataccattagaatttcaaagcattctgcaacttcaaagaggtcagattggtaaaatttgtgcttgcacaccctcatggaatattgtcagtattcattccaaaattgttactagaacaaaacagctttatccattcccttgccagcagaagtcttggcacgagatggctcttggctggaccataaataaaattccttgaatcaccagtatcttgatttaagaaagaaattttactgtgtctttcatacacaaaagctgattaacaatggttaaaaaaacactactccactttttcacaggtgt

SEQ ID NO: 1628 - DNA, 411 bp, Homo sapiens; identical to SEQ ID NO: 1258

SEQ ID NO: 1629 - DNA, 231 bp, Homo sapiens; identical to SEQ ID NO: 772

SEQ ID NO: 1630 - DNA, 498 bp, Homo sapiens
cggactccagcctggacaacagaatgagactccgtgtcaaaaaaaaaaaaaagattgctgcttaatctttaatgagcataaagatcaacttgagatctgacacctgtttaagaattatttgcctggaccaagataatgaatctactctcctatgtttccttctagattctttattgtttttttatgtaggtctgtgatctactttgaataattttttgtagcgtgtgaggtaggatcaaggtgtgtgtatatagatttatcaaagagaccatggtttcctctttgctgaggtgatctctgcctcttggttcatttgtcttttcttgcatcaataccatactatcttaatttatgttgctttgtaatatttttggaaatctggtagtgaaagccttccaacttttttattctttaagattgtcttgccttctctgttccccatgtttcctaaattaattttggaatctcaggattaattttcacaaatgaatttttggt

SEQ ID NO: 1631 - DNA, 310 bp, Homo sapiens
accaaaaatccctgtgaaatctgacaaattaactagagcacagagcaagcactctgatatttgttgtcaactaatatcagcctggtgttaattccatcttctcccatcatccataagaaatgctgtgttcgctctagttttccaaaccaactattataaagcttattttttcttctatgatgcatataagtaataattacattttttcatgtccctgaaagtatacccaaggtgctgtccatttcgtgcttcgtgcctaaaaatgcctttcttttccatcagaaagcttatcagaagtataaatgagagt

SEQ ID NO: 1632 - DNA, 492 bp, Homo sapiens
acaaagattggtagcttttatatttttttaaaaatgctatactaagagaaaaaacaaaagaccacaacaatattccaaattataggttgagagaatgtgactatgaagaaagtattctaaccaactaaaaaaaatattgaaaccacttttgattgaagcaaaatgaataatgctagatttaaaaacagtgtgaaatcacactttggtctgtaaacatatttagctttgcttttcattcagatgtatacataaacttatttaaaatgtcatttaagtgaaccattccaaggcataataaaaaaagaggtagcaaatgaaaattaaagcatttattttggtagttcttcaataatgatgcgagaaactgaattccatccagtagaagcatctccttttgggtaatctgaacaagtgccaacccagatagcaacatccactaatccagcaccaattccttcacaaagtccttccacagaagaagtgcgatgaata

SEQ ID NO: 1633 - DNA, 488 bp, Homo sapiens
acacagctgatagaatttgctgttgtggctccagttcactgatgctatgaactacgggctagaaacagagggacttaacagggcttgagactagcatttctctagactcagcatccttagctccaaaggttcaaaagagaaattggtaacaactaaccactcaagcaattcctcagcattaacaccaaaaattctccttaatttttcttttcttttttttttttttggacaacagaaataaatcctagaggacaaaattaaactcaatagagtgtagtctagttaaaaactcgaaaaatgagcaagtctggtgggagtggaggaagggctatactataaatccaagtgggcctcctgatcttaacaagccatgctcattatacacatctctgaactggacataccacctttacgcaggaaacagggcttggaacttctaagagaaattaacctgcaccacccacatctaacctacctgccgggtaggt

SEQ ID NO: 1634 - DNA, 492 bp, Homo sapiens
gtgcctctaatactggtgatgctagaggtgatgtttttggtaaacaggcggggtaagatttgccgagttccttttactttttttaacctttccttatgagcatgcctgtgttgggttgacagtgagggtaataatgacttgttggttgattgtagatattgggctgttaattgtcagttcagtgttttaatctgacgcaggcttatgcggaggagaatgttttcatgttacttatactaacattagttcttctatagggtgatagattggtccaattgggtgtggggagttcagttatatgtttgggattttttaggtagtgggtgttgagcttgaacgctttcttaattggtggctgcttttaggcctactatgggtgttaaattttttactctctctacaaggttttttcctagtgtccaaagagctgttcctctttggactaacagttaaatttacaaggggatttagagggttctgtgggcaaattta

SEQ ID NO: 1635 - DNA, 414 bp, Homo sapiens
actgagacttcagaaacgccaggctttagggttggagctactttagcccttgagtaagcctactgtagacctgacttaaaaagcatagaaacaagcttcaaaaggatcagggaaatggccaataaattaaacgcctgtcaaaaagacaaaaatcaacactcgttaaaggaagagaccaaaactcagatgttcccagaatgtttttcctcatgacccaaaactataagacatgaaaagaagcaggaaaatattcacgatcaaggagggaaaagtcgatagaaacaaaagatgacagatgttgcaattaataatcaaagactttgaagtcactactatgagcctgtttaaggaactgaaggaaaagatggacataataaaagaataggtaaatctcagtaggtaaatagaaacagt

SEQ ID NO: 1636 - DNA, 205 bp, Homo sapiens
acctgaaacaccgtcattattgctgctggaaaagtatcgaagttggtgggaggagtcccttcatcgaaattaaactggccgccgaagagttgcattcccaaaagggcgaagacgacaatgaacaggaaaaggagaaacaacaggctgatgatggacttcatggagttgaggagagagacgaccaggtttctgagagatgcccagt

SEQ ID NO: 1637 - DNA, 220 bp, Homo sapiens
cgcctctagtgtcctccgctgtggcaagaagaaggtctggttagaccccaatgagaccaatgaaatcgccaatgccaactcccgtcagtagatccggaagctcatcaaagatgggctgatcatccgcaagcctgtgacggtccattcccgggctcgatgccggaaaaacaccttggcccgccggaagggcaggcacatgggcataggtaagcggaagggt

SEQ ID NO: 1638 - DNA, 452 bp, Homo sapiens
acaaaattctagaggctacatacattgtgaaaagatcaatcactgtccatgaaagagatgccataaaaagttttatctgtaaggtgctcaagatccaaagatgaacagttcttatgcaaagtcataagaaatacaaagctagtttttggagcaggtgtaattcaggcactgtgaactatattaaaccttccaggtcccaatatcattttttaaatttctgcttcagggcagaaaataaaacctgaatgatttaacattgcttctaaaaagtgcctaatttattcctaggaaatattttacacacaccaggaaaatcaggctcaacatattcctgtcctcaaatgtagccaggattctgagttccatagaagaaaaataattattatagtaaaaataattgtagtaatcctaatccttgctaaaaccaactttaatacttgtgatgcttctgt

SEQ ID NO: 1639 - DNA, 537 bp, Homo sapiens
acatttacacagaggcacgtctgcacatgaaatgtgtgtgcacaccaaaaaggcagtttagctggttgtctataccttttccttaaaaaaaataaatataaaaaagcttttgaaacaatgcttaactactttacaatccctgaaatagacattgcctttactatagaaactatgaaactctgatccgttcagaaattcaagattgtgggctcaatttgaagtgtggatgagtctgtgtgtgtgtgtgtgtgtgtgtctgtgtgtgagtatgcctgtgtgtgtgagtgtgtgtgtatattttgtagcatttgaagttttgtggcaagatttctatcaaattgaatgttgtcctgtttcctatggtgggtgagacccaaggtgccagtgtttgaagtaatcattcagattggagtagcattttttcatgtgttactatattttccattcctttccagtcaacccagtaagataaatgctatttcaggggatatggtatctacaaaatttttcatttggatgtgtttgtatttgctaagt

SEQ ID NO: 1640 - DNA, 426 bp, Homo sapiens
acaggaaggtggggaccctcccccagactctactcagattccaatgagcaccagggagggaaaagatggaaaactaaaaggaaaaacaaaaggaaatccagaacaatccgcctagccctgcaggaggatcttgtgtcacagccaagggccagggaaggaaggaggatcactcttcatccgacgaagtccaccggccctgcctgcttcaggcttccaggagcttccccaggaagcggaggttgaggatcttgagctgctcatcaaggtccatacggacaatgccatcctcaccatcaatgctcagtaggacgcccgtggcttcccgatcctcgcccaggatcactttcaccttgttgttcttggtgggggtgataggctccaggtgctcactggaaatgctgacaaccttctcactgtccttcaggt

SEQ ID NO: 1641 - DNA, 259 bp, Homo sapiens
actccaaagtcctgatcatttcaggactgggaaacttttggacattttccaacctgaggtctggttctttctgaagcagctggtttctctgaaatgaagctgcttcagccccagagatgaggaaaattaaagggataagagacagggctgctccaagccagtgggtctttgcttcagccatgtttgaaagatttcctctttttgtttatatgacagaggagctccacagcatattcctccccgttctccgggcgagctt

SEQ ID NO: 1642 - DNA, 322 bp, Homo sapiens
actgaaagaatcttgtcagatatccaaggctaaaggaaaattttaaatttaatccaatcagatgaagaagctgataaaaaaggtataaccattagtgggagaacagcatttaaaattctctctatggcttttctgggctttttacctctgtctcaaccaaaaccaaaacaaaaccccagaacaacaacaaatgagttgaatgttgctcagatttggagtatttgatgttacccctttctgatgaacgtctgagattaaagatctgcattaaagatgaaatagaacacactaagaaaagggttgggtaagaactttcacacgt

SEQ ID NO: 1643 - DNA, 599 bp, Homo sapiens
actgaatttgaaagattccaagcccttcccaactcaaagagtagaaacacatgcctccattttaaatcatctttcatttgtaaaaatacatatatgtttcatggaaaaaacacatttccatcaagctagagggaggattgctattttgcatcttttttgcaatgcacattctccaacagataatccacgtgtgaagtttttttgccctccttccacacaaatctgttattacctttttctttctttttaacttttaattgtattgttttgttttaatgcccagatagcacagcattcctcctttacttgccttttcacaagcccgtaatcaatatctgtaaaagttaaaattagtttccacagaaacattaatttcaaagcaaacactatcttaatgagcctaactctggtaaattaaaaatataaatggcactattaagagaggccaaggaaacaatacgtaatatttagcaggatctctaatattctaatttcagaagtgttaaactgtgtaacagttacaggacctatctttcataggcaaaaacagatccgtgcctcagtttccacatttatgaaatgtgcctgaaaaattattt

SEQ ID NO: 1644 - DNA, 267 bp, Homo sapiens
acagccatgcaacagaggcctagcatttgtgctgtgtctgtgggaaaggcagtcagagaccagtggtttccctgctttggggaagatggctcaacagttagtaatcccaggttagattgtcagaacagtctaggccaggactgagggctcagctgccagggctccccaacagaaaccactcccctctggctgacactgcttccttgcgcaccagtctcttcttgtcatccaggggtttggctaaggcccgaatcacctgtggtttgt

SEQ ID NO: 1645 - DNA, 340 bp, Homo sapiens
actgcagatgctcagaaagttaaatctcgctctcatatgtatgcaggtatgtcttgagtgtcaggatttctgggtagctgcggctggtctttcggaagaagtccaggctggtgagatgttcaatgtcacgcaccctagctgtgtgcatcttcatgagttcttctacccattttgattcgtcctctgagctattgcagctctcctcgttgtcaggccggtgaggcaggatgaaggaggacacagagagagggccgtcacacttgtcggcaggctgagtgaaatccagacagctggtgatgatgctgtagtagtgagttggaacaggaatggaactgccttc

SEQ ID NO: 1646 - DNA, 455 bp, Homo sapiens
  misc_feature 449: n = A,T,C or G
cagcaaagagaatatagaaaaaaatgaacaaatcaacgatgagatgaaacgctcagggcagcttggcatccaggaagaagatcttcggaaagagagtaaagaccaactctcagatgatgtctccaaagtaattgcctatttgaaaaggttagtaaatgctgcaggaagtgggaggttacagaatgggcaaaatggggaaagggccaccaggctttttgagaaacctcttgattctcagtctatttatcagctgattgaaatctcaaggaatttacagatacccccagaagacttaattgagatgctcaaaactggggagaagccgaatggatcagtggaaccggagcgggagcttgaccttcctgttgacctagatgacatctcagaggctgacttagaccatccagacctgttccaaaataggatgctctccaagagtggctaccctnaaacac

SEQ ID NO: 1647 - DNA, 342 bp, Homo sapiens
acttggaaaaagatcttggagagctgctatcttgagttaggagttgagctgaaataggaaataattaaaatgagaactcaacctagagaaacgaacaagaacctgaagaaagcaaaagtctaaagctaaaactctttagtagatataagcaaagagaaaaaagggccagaatggataggaagggactcccaaaatctgagcataccagccccttaaggagaaatgttgctagacacccatagttgaggttagaaagaggaaagaaggaagagttagtgggctagagaggggaaggatgtgatgtgagcagatggttctcactcattctcctctgtccagagt

SEQ ID NO: 1648 - DNA, 389 bp, Homo sapiens
actctgccttggagcagagcaccaaatgatctgccctggagaggctctgggacgggtttacttgtttttgaacagggtgatgggccctatggttttctagagcaaagcaaagtagcttcgggtcttgatgcttgagtagagtgaagaggggagcacgtgccccctgcatccattctctctttctcttgatgacgcagctgtcatttggctgtgcgtgctgacagttttgcaacaggcagagctgtgtcgcacagcagtgctgtgcgtcagagccagctgaggacaggcttgcctggacttctgtaagataggattttctgtgtttcctgaattttttatatggtgatttgtatttaaattttaagactttattttctcactattggtgt

SEQ ID NO: 1649 - DNA, 221 bp, Homo sapiens
  misc_feature 184, 201, 206, 211: n = A,T,C or G
gtagttcctagaatgctgtgagggcggggggttcagatcaacataaagcctaacttgctggagttgtagtctcaaggctttctctcttgcttaactaaaacctaaggaccactgtttttggtagcaattatatggttactatccactgcagtcctcagttgttggggtaaatcccacatggcanagtaaggcaccccacanaaatnaactnggagagcctg

SEQ ID NO: 1650 - DNA, 411 bp, Homo sapiens; identical to SEQ ID NO: 1258

SEQ ID NO: 1651 - DNA, 385 bp, Homo sapiens
acactaatttacacaggacacactaccatttactatgtaacattaaagctttcagtttaagaaactggtcaccaacgaagtgagaggcaccagggaaaaaagccaacctgctgaggaagacaaaagaggggaatgacagaaggaagctggatcttttataatgtagtttagtcactatgctgatactggaaccatctacctctgcatttcctgctatgagaaataatgtctttgtctttaaatgtcttttttaaaaaaaaacaaaagaaaagaaactgatcaaaaagttttgcataagattcattttaaaaatcttttttccttaaaacaaaaacgattaaaaacttgggttttctaaagaaacttatattaatatgaagttacg

SEQ ID NO: 1652 - DNA, 309 bp, Homo sapiens
attattctcatcacaatacggtaaaatggccaataaagcaaacacttccggtgactttgagaaagatgatgatgcctataagactgaggacagcgatgacatccattttgaaccagtagttcaaatgcccggaaaagtagaacttgtaacaggagaagaagatgaaaaagttctgtattcacagcgggtaaaactatttagatttgatgctgaggtaagtcagtggaaagaaaggggcttggggaacttaaaaattctcaaaaacgaggtcaatggcaaactaagaatgctgatgcgaagagaacaagt

SEQ ID NO: 1653 - DNA, 293 bp, Homo sapiens
acctgcttccaattcttttgggtctattcctaggagtggaattgctggatcatatagtaattctatttaatttcttgaggaaccaccaaacgattttccacagtgatcattttacatttccaccagcagtgaatacagttgtttcattttttccacatccttgccaacactttttttttttaagacagagtttcgctcttgttacccaggctggagtgtagtggcatgatcttggctccctgcaacctctgcctcccaggttcaagtgattctcctgcctcagtctcccaagt

SEQ ID NO: 1654 - DNA, 331 bp, Homo sapiens
cggccgaggtacaagcgactctacctgccaggagagtccctcaccttcatgtgctacgaaggctttgagctcatgggtgaagtgaccatccgctgcatcctgggacagccatcccactggaacgggcccctgcccgtgtgtaaagttaatcaagacagttttgaacatgctttagaagtagcagaagcggcagcagagacgtcgctggaaggggggaacatggccctggctatcttcatcccggtcctcatcatctccttactgctgggaggagcctacatttacatcacaagatgtcgctactattccaacctccgcctgcctctgatgc

SEQ ID NO: 1655 - DNA, 583 bp, Homo sapiens
acatatatgaaactaattgtgtcatttttctttttgttacaatatagagtgatgtttcaaaacacaaacataataggtagagtcaattacttaggggagtctaaacctggaggtaacattagaaatagaaataataaaatgcagtgtttttggatttgtctgttaagattattttaatccaaatcatatttaatggtttacatagttgtatatcaaatttggttttagaaataaattatacagtaaatttaaaaatgcaaaaaatgtatattgttatacattctgtaacctatgaatccatataacttgggcaagaaaattatataattaaaaataaaacctttctgttctcaattatgttttagggacagctatatagttcacactcacaaaggaatcataaaaactctatgtataatcttggaagtaaaaatatctgttgtatcatatttatgaagtatacaattgattaaaaatgataatgtctgtcttctatccaacggcaataacagaagataatggcatataagtaggcctgtctcctttttttggcattgatttatatatctttactagctttgtt

SEQ ID NO: 1656 - DNA, 502 bp, Homo sapiens
  misc_feature 76, 122, 225, 256, 264, 493: n = A,T,C or G
accggaagaagaatgttcattacaaatataggaaacataaatattaccaaatattggcaagcactaaaatgttcanaaatataagtctactacagttatagctctctcaagcaaaaaaatancagagaaaagcttagtttaccttaggggctatttatttacttagggatttgttaaaaggtcaaatggggtcacacagaatactaagaagagctgttcacccangcctcactaagaactcttcttcattcagtanctatatantaacatgacaactgctcctacgacccaaagaggaactacagcaactactctttagcatctgttgctcccaactctgctttgcaattatatgactcaagcattctggctccgttaactattactgctgttactcccaattaaattccctctaaaaaataaaaatttttaaagctctaatttaagctctctgctgcctcatgacttcaattccatcagagttatgcattgnttcctctgt

SEQ ID NO: 1657 - DNA, 524 bp, Homo sapiens
  misc_feature 166, 168, 245, 442, 450, 451, 478, 506, 513: n = A,T,C or G
tttgacttctaatgttaactaccctccaaagcctcctgggtcaagaaggctctcccaaactccacccctgttcttcctggtcagagaaccagtcagtcattctagtcttctagtccttaaactgatctgatgacttggaacataggatttcactgcaagtctggcntncctagtctggaaatacatttgaggtctgttttcgcacagctggatcacctgtttcctggttttattacacaattcanaaggctagaagaggagtttgggggcttggcacctgaaaatttagaccgcattcttattaagtaaaggaagaggtagggaggccgaggcgggcggatcatgaaatcaggagatccagaccgtcctggctaacacagaaaccccgtctctactaaaaatacaaaaaattagctgggcatggtgacatgtgcctgtagtncatcccanntactcgggaggccgaggcaagagaatnacctaaacctggaaggcggaggttgcantgagccnagatcacacca

SEQ ID NO: 1658 - DNA, 525 bp, Homo sapiens
  misc_feature 473, 497, 505, 524: n = A,T,C or G
cctacatgaaactcatgaaagtaaattccttttccgtatttgttttcatgagtttcatgtaggaaactgtcaaaattattcgaacagatagattccacataggcacggcttgtcgcataaaataggagttttccttcttccttcatctgcgatttcttccatgtaaatttatccaggagctctgagttctcgatcttctttatcttttcaatcttgaaatttttcatggaagctttaaaatgctcacttactctgacatattctggatgtaggtgatggatctctgacaacttatatttctttgaggataggaagcaaaagtcctcctgaggacgaaaggtcgcagttaaagacactgacgaggtctttgctggctcatggtctggccctctcttcatctgctgcacataccactgaggcacaaatgttggtcttctgatgacatccttttgagttttggaagctatgtttgnctgaatcatcccttggaaactcanctcatagntgcgtgagcccgcctgaant

SEQ ID NO: 1659 - DNA, 225 bp, Homo sapiens
actccttcccatggctctcctgactctcattctctctctcccgtcgagactgaaggatagaatcacaaagctcgtgggcagcttttaaatcaggccagaaattgtccaggtaattcttgaaagtaatcacgaatactccttctgtttcacttccatactgctgaattgcctcttcatcttctgtcaccataacaattggcatcctgtcctggcagtgatgatagt

SEQ ID NO: 1660 - DNA, 290 bp, Homo sapiens
  misc_feature 169, 280, 283: n = A,T,C or G
acatatgctgctgttatcattttaccagcaaaccacctgccatgcaatgcattgacagcagcaatagctgcagcaattgatgggcacttcacatacacattgccctgagctgaatttttgtcaacataaatatgaataactcctccatgtttattacattcttcaatcncatcatccttaatctcggtatcccatccaacttcttcttctgtttgagggttaaacatgttagagagttggaaacattgtgttgcaagtggctgaacagaggcagctgcanctnaagctga

SEQ ID NO: 1661 - DNA, 106 bp, Homo sapiens
  misc_feature 79, 93: n = A,T,C or G
atttaccccaagccagcccgaacacaccactgcagcatctgcaacagctatggaagttgggaccttttccgggaggctnatgctgccattganaaaatgaaacagc

SEQ ID NO: 1662 - DNA, 551 bp, Homo sapiens
acggtagaactgctattattcatcctatgtgggtaattgaggagtatgctaagattttgcgtagctgggtttggtttaatccacctcaactgcctgctatgatggataagattgagagagtgaggagaaggcttacgtttagtgagggagagatttggtatatgattgagatgggggctagtttttgtcatgtgagaagaagcaggccggatgtcagaggggtgccttgggtaacctctgggacccagaagtgaaagggggctattcctagttttattgctatagccattatgattattaatgatgagtattgattggtagtattggttatggttcattgtccggagagtatattgttgaagaggatagctattagaaggattatggatgcggttgcttgcgtgaggaagtacttgatggcagcttctgtggaacgagggtttatttttttggttagaactggaataaaagctagcatgtttatttctaggcctactcaggtaaaaaatcagtgcgagcttagcgctgtgatgagtgtgcctgcaaagatg

SEQ ID NO: 1663 - DNA, 599 bp, Homo sapiens
accttttcttcccatcaaaaatgcattaacaagatcatgcttatagttagtcagcacaagaaaaaaacgacaatttatactgaactatttaagtcttgcagtagagtgctcacaactccgagctgtatctgttaaccttttcaatagcattcattatgtgacattgtcaccaattacagtaaaagaacttcactaatttttgaaagctagaattactcaaaaaattctgcattgtaaataataccaggaatattgcatttaagcctaggatggcaaaattacttaaatcttttctatacttttttgtgtaatataggtaggaaaatgaatactatataagaaaatgaaatatatcaagttcttatatttttacctaagaggctatttattttaaggaaagttgattaatatttaaatgattaaaaaataaatcaatgttaagtattaactgcacaaaatctaaaaaaaagaccacattacatcatactacattatatagatagatttaaagcagctaactagaagcctttttaaaaatttaaagtttctgacatcattttccaccattccatcaattcttccttttcctcttctttcct

SEQ ID NO: 1664 - DNA, 327 bp, Homo sapiens
acaggcataaagccacccttcactcttgaaaatccattttgaatgttgttgttttaattcttatgcaagaaaaggatctggatagggatttcaggccatcctgtcaaccctggcaggcttgtagatcatgcaggaactgggaggtgtgagattttgccagtaggatcctggcaagtgcctgggactctcccagggttttggaagagccgacggacatgagtccaacagggagcatctttatatcatggccgaagggatgagagaggagaccctcaaacctcacgcctaccacaccctccccaccccactgtcaagagtccatctggt

SEQ ID NO: 1665 - DNA, 369 bp, Homo sapiens
ctccagcctgggtgacagagcgagacccagtctcaaaaagaagagaaataactgtatcccaaagattccgagaaatgaggattgttttagaattgaggacatcagaaatgtgaaaggttttggaatgactgttgatgaaaacagattaattggtctgctcttgttatttaggaacactgcctcatggggatcaaaggaactgtgaagcgtagcacagacggggacttcattcatgctaatgttgacattgacttaattatcacagaagaacctgaaattggcaatatagaaaaacctgtagaaatttttcatataattgagcatttttgtcttggtagaagacgccttcatctatttggaagagatagt

SEQ ID NO: 1666 - DNA, 534 bp, Homo sapiens
  misc_feature 490: n = A,T,C or G
acgggaaggcgaagaaaagaatagagaagatagggaaattagaagataaaaacatacttttagaagaaaaaagataaatttaaacctgaaaagtaggaagcagaagaaaaaagacaagctaggaaacaaaaagctaagggcaaaatgtactattggccatgaggcatttaggacccttgttgattgaaatggctgagatgataaacgagtatccagctcccaagaatccaaccacagcaaatatcgtggaggtgaacatcgcaaatcgcttcccacagccctcgttgccgcagcacccacagcagtcattgttcttcaggcccaagaacaccagcgcagggaagatcatcaagacaccgcttcctaatattcctccgaaaaaccagatctcttgggaaaggtggtcgttgtcatctatcacttttcctccaggaaaaaataacaggatgttagccaggaagccaaaaaaagcaaggggaatgagggtccnccccaggcatctggcacagcctccagtgcacattctggggtggt

SEQ ID NO: 1667 - DNA, 266 bp, Homo sapiens
accaggcaggagatttgttaagaccactgcattgtctgaaggagaaattgacaactctgcaacatcttcctcatttttcacaggtgagtaacgcaccaggaagttggttaaatcaatggatgggggtggagcccaggtgacacgcatggtgtctggaccaatgttggtgaatcgcaggtcagtgggaggaggaacagctgggatgatggtatcagagatagggacactttccttgtcatccttgacagtgtaaacactgacattgt

SEQ ID NO: 1668 - DNA, 313 bp, Homo sapiens
acagtgcacgcaatgcaaaacaaattatcatgtgactttcacattggatatttagaatgctgaacggcaaaattaaagtataaaatttaatgatcagaatgctgactgatttccataattcatttcccctctggaaattaaagaggaatcactgattccatttaatgaccatacaattcatgtaaatggctaacattatttagcagaatacacattcacctgacttgattagaaaaagttttccattaacttagcaacactgctgaagcagtctcacattagagcacagagtggaggtgggaggacgggaagt

SEQ ID NO: 1669 - DNA, 284 bp, Homo sapiens
  misc_feature 85, 100, 110, 119, 153, 202, 225, 230: n = A,T,C or G
tttttttttttttttttttttttttttttaacagtaaaaacgtcaccaaaaattatttattgctatgataacagcaaattatatnttgaaggaaatttgnggcgtagggngggacaaangctggtggcatcgtgggtggaaagagggcccctntaaacctgcactttggccccaccatcgcctgagtacattaaaaacatanaaatatatcactcacaccacatnaactnctacggacaaaagggctttttctaaaccctgctcctttctgaagcacacaccac

SEQ ID NO: 1670 - DNA, 446 bp, Homo sapiens
actatgtctttcatcaataatgaaatcttctgatttgtaagacatgctgccaagagatgtgccattctattataaaagatcagtagcctcctttaccgacgtgtatattctatctagaacattgagctatggaagactcccgcctaagggaattagttttacaccttcagataaagactgctgagaagagcaccctctggtgttgtcacagaggcaagtgctaccgcacaggcatgctgcagtgaatttaactgatcctctgtccctgcaaccgttgtttaaggatgctattctgaaaagactgtggaggaagaaaaccctttaccctgttgttcagggagaaactgacaccactcaactgcctggcactgaaaatgtggcatccagtccactttaccatcagtgtttaaggaaaccatctctgataaggatgactgaggaagagt

SEQ ID NO: 1671 - DNA, 497 bp, Homo sapiens
actattgacccagcgatgggggcttcgacatgggctttagggagtcataagtggagtccgtaaagaggtatctttactataaaagctattgtgtaagctagtcatattaagttgttagctcaggagtttgatagttcttgggcagtgagagtgagtagtagaatgtttagtgagcctagggtgtcgtgagtgtaaattagtgcgatgagtaggggaagggagcctactagggtgtagaataggaagtatgtgcctgcgttcaggcgttctggctggttgcctcatcgggtgatgatagccaaggtggggataagtgtggtttcgaagaagatataaaatatgattagttctgtggctgtgaatgttataattaaggagatttgtagggagattagtatagagaggtagagtttttttcgtgatagtggttcactggataggtggcgttggcttgccatgattgtgaggggtaggagtcaggtagttagtattaggag

SEQ ID NO: 1672 - DNA, 318 bp, Homo sapiens
gttcccaaactcaaatctcagagtgggtatcctagcatctagcaagactgagtggggagatttctcatccgtgtgaaaatgtagagtgaggcctctgactagctaattgtgtattttgttgggtttagtattttctaaatgtttacaaaatattgggctgcatgttcaggttgcagctagaaggagcttgggcagattttcaattacgctttcaagatataaccaaaagctgtttctaaatcctaaaattagaatttcaacagagccccctttagaacagtcatataacgcttgtgtgggccaacagaggggctgtgt

SEQ ID NO: 1673 - DNA, 577 bp, Homo sapiens
  misc_feature 566: n = A,T,C or G
actgggattacagatgtgactcaccatacctggcctagcctagtttttaaaaagcatcctccattcattccagcacacattcccagtgcccagttgtgtgtgctgggtgatgttggtgacacagtgatgattgagaccacctctgccctgccctctgtccacagtagggcacacaatcctgtagggtttgggggggcagacccctctcacacaattatgatccagagtgatcagggctgggatggaggagcccaggagtctgggagagcccaaggagacacacctcattcaacctgacggctagggagggcttcctgggggagggggcatctgagctgagacctggagtaagagtagaaatgaggcagatgatggggtgaggcagcatgaggtgcaccaggcagcataaatagcaatgcaaggatgtggaggctgagatagtcatcaaggtgtattgaggaggttgcaatatcttgggtgagtggagccaggaaggagggtgtggggcctgtgtgtgtgaggctgggaggtaggagagatcaaatgtgctctgttggttggatcancagagcttgga

SEQ ID NO: 1674 - DNA, 545 bp, Homo sapiens
accagggcaccaggcccacccaactgaaggcatggcggcggggtgcaggggaaagttaaaggtgatgacgatcatcacacctgtgtcgttacctcagccatcggtctagcatatcagtcactgggcccaacatatccatttttaaaccctttcccccaaatacactgcgtcctggttcctgtttagctgttctgaaatacggtgtgtaagtaagtcagaacccagctaccagtgattattgcgagggcaatgggacctcataaataaggttttctgtgatgtgacgccagtttacataagagaatatcactccgatggtcggtttctgactgtcacgctaagggcaactgtaaactggaataataatgcactcgcaaccaggtaaacttagatacactagtttgtttaaaattatagatttactgtacctgcccgggcggccgcccgggcaggtacgattcggccttttctttaaaaaaaaaaaaaaaaaggaaatttgttcatttgcaaccacatgagtggaattggagaacattatactaagt

SEQ ID NO: 1675 - DNA, 540 bp, Homo sapiens
  misc_feature 224, 437, 452, 453: n = A,T,C or G
caaaaatacccaaaatcacaaacttgaaagaaaggaaaacaagtttgtcagacctaaatgatccaatcattttgtccagtgatgatgatgacaacgacagaactaacagaagagaaagcatatctcctcagcctgctgattcagcatgttcttcccctgcaccatccactggaaaagtagaagcagcactaaatgaaaatacttgcagagcagaacgtgaactncgaagcattccagaagactcagagttaaatacagttacattgccaagaaaggcaagaatgaaagaccagtttggcaattctattatcaacacacctctgaaacgtcgtaaagtgttttctcaagaacctccagatgctttagctttaagctgccaaagttcctttgacagtgtcattttaaactgtcgaagtatacgagtaggaacactcttncggctgttaatagannctgtaattttttgtttagattttatcaagatacagctagacgaaccagaccatgatcctgtagagattatattaaatacctctgatc

SEQ ID NO: 1676 - DNA, 273 bp, Homo sapiens; identical to SEQ ID NO: 706

SEQ ID NO: 1677 - DNA, 153 bp, Homo sapiens
actgtggatgtagagtataaaacttgaaaaatgcagatgttgaaggaataataggtatcttgtgctttaatactttatggcaggattgtacatgggccctagtgacacagatgatgactgacccatgggactcctcccatcccccaggctggt

SEQ ID NO: 1678 - DNA, 491 bp, Homo sapiens
accatcaccccattttacagatgaggaaactgagtcatacagcttaagctatttgcctatggtgacatcactaatcaagcagtagctttagggcccagatacaggcagtctggctctggagctgacacattgaatcactcagcaaacacttcctcgagtgcctcttttatgcccggcccagtggtaggcggtcctggggacacagtcatgacagtgacagcctcaggtctgctatcttggggctcacagtccactggggatgacaaacaagtcccccacggtgatgacccagaatgggcaaggctggagtgggagagcctagtggatgcttggctcatgcttgggggtcagggagggcttcctggacgaggcagtatccgcctgggttgtaagggagcagctttgtttagtggttgaaggaaaagcttggtagtcaaagatctggcttcttctccccaacaaccatgtccagctgtttgaccattggcagg

SEQ ID NO: 1679 - DNA, 588 bp, Homo sapiens
actactccatttaaaaagcaaatgaggagactgatttttttcctatctagagctggtttaaattcaagtgaagccattaattttcttaccagtctggactgttctgacatgtcacttcacagttttgagactaacaaacacccttaggtctaccccaaaccaaaaaaagccagggagggacagtttagacaacttttaagttaagactagaatgcccccttaagtagataggcaccaccgttatacgcctttagcacaaggcttagaaaggcaaaacatttctaaagacataaaaccgccaaattgtcatttacactaagctgtggtattttttgttctgatttttaaaaattcctatctctaagtaatcaaatacagcaaaatttaaaactattctgccaaaccataccagttcaaaggtctgaaaccgttctttgctttggtgaatgtttggttaaaataaatcactgtttcactccatgagaagttttacatcagagcactcaattcacaggcaaaaaaaaaaagttactttttaaatgaaagcgtttaaagaacactgctgaataaaaaatatgtggtctttac

SEQ ID NO: 1680 - DNA, 457 bp, Homo sapiens
  misc_feature 131: n = A,T,C or G
actcataatagacttcatagttatctgagggaagtcggctgtgtagtcaattttttgttttaacctataaaatggctaataaaggattttcatcctgtggtcacagtgacaattcaaagatttatggaggnaaattgatctgtaatcctaaatgatcataaaataatatcagtaaatttgtcttaagcttttccaaatacattctgccctcaacttgtttttattctcctgagtgtcaaatcaaaatttgtttctgaaatgctgcagttgagacccactaaagtaaaaagaaatgggattttttactccctgccaagacaaggccatggaatgggaagtgtgaggtcacagggcaacagcatgacttggtgtgatagcagcgaattctggagactgtgttctattaaagtatcctttataacttgaggaaggatatttaattcatgtttcagactgt

SEQ ID NO: 1681 - DNA, 559 bp, Homo sapiens
aattaccttagcagcaactgttttgagatcaccgtggagcttagctgtgagaagttcccacctgaagagactctgaagacctactgggaggataacaaaaactccctcattagctaccttgagcagatacaccgaggagttaaaggatttgtccgagaccttcaaggtaacccaattgcgaatgccaccatctccgtggaaggaatagaccacgatgttacatccgcaaaggatggtgattactggagattgcttatacctggaaactataaacttacagcctcagctccaggctatctggcaataacaaagaaagtggcagttccttacagccctgctgctggggttgattttgaactggagtcattttctgaaaggaaagaagaggagaaggaagaattgatggaatggtggaaaatgatgtcagaaactttaaatttttaaaaaggcttctagttagctgctttaaatctatctatataatgtagtatgatgtaatgtggtcttttttttagattttgtgcagttaatacttaacattgatttattttttaatcat

SEQ ID NO: 1682 - DNA, 460 bp, Homo sapiens
  misc_feature 167, 230, 290, 337, 446, 450: n = A,T,C or G
acctctataatttgggtgaccagtatgcactgaagatgaggtttgtggaccatgtgtttgatgaacaagtgatagattctctgactgtgaagatcatcctgcctgaaggagccaagaacattgaaattgatagtccctatgaaatcagccgtgccccagatgagctncactacacctatctggacacatttggccgccctgtgattgttgcctacaagaaaaatctggtngaacagcacattcaggacattgtggtccactacacgttcaacaaggtgctcatgctgcangagcccctgctggtggtggcggccttctacatcctgttcttcaccgntatcatctatgttcggctggacttctccatcaccaaggatccagccgcagaagccaggatgaaggtagcctgcatcacagagcaggtcttgaccctggtcaacaagaanatangcctttaccg

SEQ ID NO: 1683 - DNA, 273 bp, Homo sapiens
acccaatgcccgagtcactgtggcagcattcgcactggtgtggggagtcctttcaactcaaggaggctgggtttctgggcaccctcgaagttttctggatgtctttttatctttctcgtgtgaactgcactacaaaagagaccagcccgcttcccaagccagccagacacctgggtcttgagccataaactggcgtagttaagctttgcagcttccagtgtattttatttattcttttgttgggtttttgtttgtttcttcttgtaaaattgt

SEQ ID NO: 1684 - DNA, 372 bp, Homo sapiens
acagacacgactggaactatgaacatctctttatggacatcaagaacaaaatggcacaggactccctccccagctcggtcattagtgccatcagtggacagctgcagtcctacagcgatgcctgtgaagtgctgtctgtcgtagaagtcactctggggtttctgagcacagctggtggggatccaaacatgcagctgaatgtgtatactcaagacatcctgcaaatgggtgatcagacgattcacgtgttaaaggccttaaacagatgccagttaaaacacaccattgccctctggcagttcctgtctgctcataagtctgaacagctgctgcggctgcacaaagagccatttggggaaatcagttcaaggt

SEQ ID NO: 1685 - DNA, 288 bp, Homo sapiens
gcggccccagagctcctgccagtctgggcgacagctagctctccgcctcttcagcaaagttcggccccctgttgggggtatctctgttaaggagcattttgaggtaaatgtggtgcctctcaccatccagctgacacaccagttcttccacagaatgatgggctttttctttcctggccgaagtgtggaagatgatgaagttggtgatgaagaggataagtccaaactgatgactactggaataccagtggtgaagcctcggcagctgattgcaacagatgatgcagt

SEQ ID NO: 1686 - DNA, 636 bp, Homo sapiens
acggttcacaatatcaagaagatttggacttttaagggtttcaccgaagtttgtgaccttaattagcttttacgttgttattcctacttttagcgaacaccacacagtttcaaaaatttagactaaagtgtccgaacaggatgcagttaccatatgaagctttaactcaaaatttggataaagaaaaaaaggcacaatgaacttcaactcaattttatgtgcacaagagttgaaaaatctgagccaccttaaagagaaattgattctaaaatttataaaacctataaataatcagaggccaaaccactatattaaaacagattccctagcaagtaaaaatcttgcagtttaaacatacgcttgtatccactttagatacaagacaaaactcactctttaaagtggctccaccttggcagatacatatatttgtaatgaatgcacacctgctatgtgttgtttatcagtgaaaacaccccagctgattcacaaagctctgatggcatctgtctcatcttcatcacagtaaatacaccccccaatggataactaaattagtttagattttctatcccttcacatcaatgcattgggaaattatacccagtaaacaagagcaacaataccatttctgtg

SEQ ID NO: 1687 - DNA, 293 bp, Homo sapiens
actggcaccaactacaccaaatacatttctaatgtcaggaacatatattgcaagtaaaacgatgataatattgagtgctagagtgatcaaaaaatggcgaatccatgagaatggaaaattggagaaaaacatcattgttacagcttttctggcagggaagtggattagagggactgtcaaaagcacagcaaatagtatgcataacttcacagtcatgacaacaacatcatgtgataagtatttactataaccttttagtaattctgactccactttgtcataaaaagtgaggt

SEQ ID NO: 1688 - DNA, 273 bp, Homo sapiens
acaggcagatgaaaccaggtcactggggagtctgcttcatttcctctgagctgttatcttgtgtatggatatgtgtaaatgttatgactccttgataaaaaatttattatgtccattattcaagaaagatatctatgactgtgtttaatagtatatctaatggctgcggcattgttgatgctcacatatgataaaaaagtgtcctataattctattgaaagtttttaatatttattgaattattttgttactgtctgtagtgttttgtggagt

SEQ ID NO: 1689 - DNA, 557 bp, Homo sapiens
acatgaattagaagcgtgcatctaggattatggccaaactgttttaaaaatgcagaaatgtaaaattacatcttgaaaatatgaagagatggtctacacacttcaaaaatcaaatgttgcttataccagagatgtatgacaatcacgggattcaagtgacaagcagtaagatctcaaaaattaatactggtcaaagataacgggaatatttttgcatttcactgaaaatacattgactactagaatacgaaatctagcaggaactcagggaaaaaaattacaaaatctaaagccaattacttaatatttcttattacctaaacaacagcatgacattaacagaaaactgcacctgcatttcaattgccaatctcacgttaattaagttctccaaaaatgaaatgcaaccaaaacgggttcaaactccaaatgaaagtctgcaaggctcagattaaaacatggaatgtttcagatgaaagtaataaaaacactattggttttgttctttattgaatggaataaaatgttgacatttctttgaaacttggaactactaa

SEQ ID NO: 1690 - DNA, 215 bp, Homo sapiens
acagattctatcttggccctcatcatgggggaactctcccaatgccaccacaggacgtatgagttgtagccagcagagtgccccagtggtgccaggtgacagtcccccggaatacattagtgcatttgctaagactccatgtgttctcttgggcctcacagaacatgggctttgagggtgggagccaagaggcagacttgggagtgcccgaggcc

SEQ ID NO: 1691 - DNA, 333 bp, Homo sapiens
gcgatgaacgccgcaagtggatccagtgcttcaacgatgtgactgccatcatcttcgtggtggccagcagcagctacaacatggtcatccgggaggacaaccagaccaaccgcctgcaggaggctctgaacctcttcaagagcatctggaacaacagatggctgcgcaccatctctgtgatcctgttcctcaacaagcaagatctgctcgctgagaaagtccttgctgggaaatcgaagattgaggactactttccagaatttgctcgctacactactcctgaggatgctactcccgagcccggagaggacccacgcgtgacccgggccaagt

SEQ ID NO: 1692 - DNA, 273 bp, Homo sapiens; identical to SEQ ID NO: 745

SEQ ID NO: 1693 - DNA, 256 bp, Homo sapiens
actccaaagccctgatcatttcaggactgggaaacttttggacattttccaacctgaggtctggttctttctgaagcagctggtttctctgaaatgaagctgcttcagccccagagatgaggaaaattaaagggataagagacagggctgctccaagccagtgggtctttgcttcagccatgtttgaaagatttcctctttttgtttatatggcagaggagctccacagcatattcctccccgttctccgggcgag

SEQ ID NO: 1694 - DNA, 561 bp, Homo sapiens
gccagttcagctaggcaaaagccatacttttcacaattaaaaaaaaaaactattctgactagagtcaggtttctcatatccatcgtgataggaaggcctaagaatggcaaatcgctttgagatataatattgaacttcagtatgaatgtgaccgaatctgaaactttgggaatttgctttagccagaataaagaaaccaaatcatgaaaattatggaagactattctgccacctgtgccccaagttggatgagcaaaccactttggatcagttcacagcattaactacaagtgaactgatcatcttctctatattcatttcacaagagctggcttaggtggggtaattaaattgccaccttcgtggttgtaaaagacaaacaaaacatggcaaatttcattaacacaaaatttcatcaactgctatactgaattatgtttagaagattctgaaagcaagattatccagtgggtaaatgagagtcgactggattctgtcagttcaaaaaaggaaagaaacaaaacttccctacaattttcttcactaaaatttattatatgt

SEQ ID NO: 1695 - DNA, 359 bp, Homo sapiens
  misc_feature 334, 337, 345: n = A,T,C or G
acccctggcacctcttaaaacgtaagagcaagctcaaaaacacgtagtgatggaaataagctagctacgctcaatgccatcgtcaatggtgagtggatacaatcaatccatgtggctcctgctcagctattaatgtctgtggtagaggatctctgacaagaggacctattatgtcaaaatgagtattcttgcaaatacccccccaccccccaaaacagcatgaacaaacggggacacctttccctgcacacagcaatcaaagacaagattaaggggccacccatcagtagccttgaagattttcagctaccaatatatgcacaaggtcacattnggntcctgttntttttttttttttt

SEQ ID NO: 1696 - DNA, 384 bp, Homo sapiens
acggcaactggagtgtgtcctggggcagcaccaatccaaccccagaaatcatggtcctgtagcactgtaagctaactgggagggaacagaggcagggctgttggccccattgctgctactaggaactaatggaagaccagtatatctagatgagcaaacaaaacttcagttgattctgtgaacactggagacactgtcggaagagacacattgtttcctgcaagttaagaggtaggaagggaaaagtggcagagatccagtctgattctaactcctctcacatcctttttggccagagatcaggcaatggctgtatgcttcttgatcctgcatacatgggtccctcatagcacttgcgtggcttctacaaggccttggatccag

SEQ ID NO: 1697 - DNA, 411 bp, Homo sapiens
  misc_feature 142, 217, 375, 376, 403: n = A,T,C or G
acggtagaactgctattattcatcctatgtgggtaattgaggagtatgctaagattttgcgtagctgggtttggtttaatccacctcaactgcctgctatgatggataagattgagagagtgaggagaaggcttacgtttantgagggagagatttggtatatgattgagatgggggctagtttttgtcatgtgagaagaagcaggccggatgtcanaggggtgccttgggtaacctctgggacccagaagtgaaagggggctattcctagttttattgctatagccattatgattattaatgatgagtattgattggtagtattggttatggttcattgtccggagagtatattgttgaagaggatagctattnnaaggattatggatgcggttgcttgcgngaggaagt

SEQ ID NO: 1698 - DNA, 251 bp, Homo sapiens
actactgaagaaggtgcattgatacatttttaaatgtaagttgagaaaaatttataagccaaaggttcagaaaattaaactacagaatattaaatattataatgtgcccaaagctctgaatagttaaaaattaaatatttattttcttccccaagctttaggtaaggagaagaggggtcaagagttaaacttagagaccctttgtctctgagaagcatccttctaagacattctgttggagttccctcagt

SEQ ID NO: 1699 - DNA, 451 bp, Homo sapiens
acttggcttggagactggcgcggcgttcgtgtccgagttctctgcgggtcactagtttcccggtagttcagctgcacatgaatagaacagcaatgagagccagtcagaaggactttgaaaattcaatgaatcaagtgaaactcttgaaaaaggatccaggaaacgaagtgaagctaaaactctacgcgctatataagcaggccactgaaggaccttgtaacatgcccaaaccaggtgtatttgacttgatcaacaaggccaaatgggacgcatggaatgcccttggcagcctgcccaaggaagctgccaggcagaactatgtggatttggtgtccagtttgagtccttcattggaatcctctagtcaggtggagcctggaacagacaggaaatcaactgggtttgaaactctggtggtgacctccgaagatggcatcacaaagatcatgtg

SEQ ID NO: 1700 - DNA, 186 bp, Homo sapiens
  misc_feature 65, 111, 167, 181: n = A,T,C or G
agagaattgcttgaaccccggaggcggaggttgctgtgagccgagatggtgccactgcactccancctgggtgataagagtgagactccctctcaaaaaaaaaggagcagntaggccctggcaaaagaacctttatgggaactttggaatccatgtcaaagggtgtnaacctaagactgangaggg

SEQ ID NO: 1701 - DNA, 216 bp, Homo sapiens
cacaaatttagtccctaaatttgtgaatgtcattgaacagcctgtagaagggaaacgctgcttcattggcatgcgggcagttgtagttgcatttgcaggactggatcatcatgacgttcttggaaaatgtctccccatcttcgcaacggaaccgcatcttcacagtcctggtcagctggggcgtgcagcatcggccgtccacgcaggaaccgcagt

SEQ ID NO: 1702 - DNA, 139 bp, Homo sapiens
acaagaccggactgcacattctaccatcccaccattaatgtcccaccacgacatgccttgaaatggattcgacctcaaaccagcgaatagcacccagtcctgcctggcagaagatcatgcagtttggaagttttcatgt

SEQ ID NO: 1703 - DNA, 125 bp, Homo sapiens
  misc_feature 75, 88, 118: n = A,T,C or G
accatgaaccgaacaaaaacctattaaatatagaacaagacgattttcatgaaaaaataaatatgaacaaatcantattttcagttgnttgaaatataggttaaccttcaattactgntttatgg

SEQ ID NO: 1704 - DNA, 572 bp, Homo sapiens
acatgacgccgctttcatgatgttctggaacaaagaaaactaacctatagtgatagaattcctatcaatggctgccaacaattgggagtgaaaggaactgactgagcaggtatacaagagaaccttctggggtgatggaaatattctgaagcttgactggagtgttggttacatgggtatatcaatttatcaaaactcactgaattgtatatttaaagtaggaacattttattgtaaataaattacacctctataatgtttgttttaaaaaatattagatacatcagctggaaatcacttggttttaacaaaaaattttctctgtaatcttatttattctagcacttttcttgtcttcaaaagcaatgcaaaacttcactgtagctaagcctatgttagactcttacaaattcctaaatagtagaattagttcaatgagtaattcttataaataattctagatttactttacctacatgaataactgatttgctacatagagccacattaatgcttagtataaatcatacaacatgatgaacatgctcacgtatatttaaatataaacatat

SEQ ID NO: 1705 - DNA, 350 bp, Homo sapiens
accagcgcgtcccatacgtggagccgcccgaatacgagttcttttggggctcccgggccagccgcgaaatcaccaagatgcaaatcatggagttcctggccagggtctttaagaaagacccccaggcctggccctcccgatacagagaagctctggaggaggccagagctctgcgggaggctaatcccactgcccactaccctcgcagcagtgtctctgaggactagcaaagtctggaggcagatgaatggtttctgaccctcaccagggctgtggaagggtgggggtgggtcattatagtattcaggatttacagtgcagtattcacgtgtaacttttaagttttcagt

SEQ ID NO: 1706 - DNA, 354 bp, Homo sapiens
acaaactttaaaactaccagagcaaagagaactacctttctgatcaaaacatgtgccacagttaaacttccttagaaaactttttaagttttctcagctaaattttctttaaaaaggtttgtgaaaagccgggaatcataaatatttaaactgtttttgtaaccactaaatgccttcaccaactcattaatccaatgttttctaaattcaggaaccagtgaccaagtggcctgaaacatgtaagccttgatcttattcttccagctacaaaatactaatattttaagaaaacaacaaaatattttctaagcacagaagctttctgaaaacttcaattaccttttccggctcagt

SEQ ID NO: 1707 - DNA, 251 bp, Homo sapiens
  misc_feature 244: n = A,T,C or G
acagaaatagcacagacacctttttttctactttgatgttataaatttcatcacagactaatttgaggtatctttgctttggcaggcgtgacagcagctgcttcacagttgtgttaaatgcctgttcatcagcatcccactctaatgataaaaactgtaatattgtttctttcggtagatccacagccagaatttcaatttcactgcttttctgatgtaagttggcaagggaggtctgaagtcnagtttgt

SEQ ID NO: 1708 - DNA, 553 bp, Homo sapiens
caccgtggagcttagctgtgagaggttcccacctgaagagactctgaagacctactgggaggataacaaaaactccctcattagctaccttgagcagatacaccgaggagttaaaggatttgtccgagaccttcaaggtaacccaattgcgaatgccaccatctccgtggaaggaatagaccacgatgttacatccgcaaaggatggtgattacttgagattgcttatacctggaaactataaacttacagcctcagctccaggctatctggcaataacaaagaaagtggcagttccttacagccctgctgctggggttgattttgaactggagtcattttctgaaaggaaagaagaggagaaggaagaattgatggaatggtggaaaatgatgtcagaaactttaaatttttaaaaaggcttctagttagctgctttaaatctatctatataatgtagtatgatgtaatgtggtcttttttttagattttgtgcagttaatacttaacattgatttattttttaatcatttaaatattaatcaactttcctt

SEQ ID NO: 1709 - DNA, 574 bp, Homo sapiens
tgaaaggaaagaagaggagaaggaagaattgatggaatggtggaaaatgatgtcagaaactttaaatttttaaaaaggcttctagttagctgctttaaatctatctatataatgtagtatgatgtaatgtggtcttttttttagattttgtgcagttaatacttaacattgatttattttttaatcatttaaatattaatcaactttccttaaaataaatagcctcttaggtaaaaatataagaacttgatatatttcattctcttatatagtattcattttcctacctatattacacaaaaaagtatagaaaagatttaagtaattttgccatcctaggcttaaatgcaatattcctggtattatttacaatgcagaattttttgagtaattctagctttcaaaaattagtgaagttcttttactgtaattggtgacaatgtcacataatgaatgctattgaaaaggttaacagatacagctcggagttgtgagcactctactgcaagacttaaatagttcagtataaattgccgtttttttcttgtgctgactaactataagcatgatcttg

SEQ ID NO: 1710 - DNA, 591 bp, Homo sapiens
  misc_feature 559: n = A,T,C or G
tttttttttaggaacctcaatgtaattttaatgacctcagaccagtgacaagggcagactgaccaggggctgtggggggatcccagagcaacctcgagggcgtcctggtgcttaccacctggaaactggtgaggtggtgggagaactcctggtggaccctagtggaagccttccagtaatttcttgaagctgagcgctcaggtgagtagggcgacatctggtggccggttgttgaaggtcattgcagagaggaaggaagccgaggaggggagcctgcagtgagggcgtcctggggttctccggttctcaccacccttgggccacgccgtctagtccacacctgaggagttggtcaggtagaaggggcggatgaccgtgcggaagccgttgaagtgccctgccgggcaggggaaggaggaggtgctcttcgagctgttggtgtccagggcactgggaatcgcagccttccagccctcgaaatcggtgacgtctgccacgaagagcccttcgcagagcatcagggctttgttttcgtaggcaatggtgcgatctgagccgncagacttggtgaggcccaggacagggagctcg

SEQ ID NO: 1711 - DNA, 580 bp, Homo sapiens
acctggagggatgcaagacctcaattaccttagcagcaactgttttgagatcaccgtggagcttagctgtgagaagttcccacctgaagagactctgaagacctactgggaggataacaaaaactccctcattagctaccttgagcagatacaccgaggagttaaaggatttgtccgagaccttcaaggtaacccaattgcgaatgccaccatctccgtggaaggaatagaccacgatgttacatccgcaaaggatggtgattactggagattgcttatacctggaaactataaacttacagcctcagctccaggctatctggcaataacaaagaaagtggcagttccttacagccctgctgctggggttgattttgaactggagtcattttctggaaggaaagaagaggaaaaggaagaattgatggaatggtggaaaatgatgtcagaaactttaaatttttaaaaaggcttctagttagctgctttaaatctatctatataatgtagtatgatgtaatgtggtctttttttagattttgtgcagttaatacttaacattgatttattttttaatcat

SEQ ID NO: 1712 - DNA, 409 bp, Homo sapiens
  misc_feature 351, 372, 382: n = A,T,C or G
agaggtgccattagcagaatttgccaagatccgagaaaaattttagctttagttctatttcagcagtcacctgacgtccttgtctatggtcttaaaaacaagaaggcacacatttgagaagatgagattaaggttaggagaaaacctcagtcattgcatgctttttagtatgggccaataaaatctcaacacctgtgggagagtaagaactaagggaatgagtttgggcggcccctcataaaggaccttagaggcagggaacagcaatgccaaatttccctctctcgtgagatgggggatcctgtgcaggctgatgaggcacccatgagaaaagccgaaaaagcatgcatnttagaaatagcccctcaattncaggagtgancatgccaaagaatgaggctggagacag

SEQ ID NO: 1713 - DNA, 587 bp, Homo sapiens
actgtttcctcagcagaggagaaaaactcaacctagttatgagaccaaccacacaacacaatgaaaagctgcactaactagttcagaatgttagttaagatggtgctggtgtgaataactcgttttttctagagcccttataaataaaatcccccagttagtgtttgcattatcagctagagggttaacatgtggtagaatgaggacttatgcaaggtataaatgcgcatagcattttactactatgagaacaagtgcagtcagaagaaaaccaactggactctaaattacacacaccttaatgacaagactccccaccacttgtgaatgtaaaacatttaatttaaaaatgttgatactacaatatataaaatagctattataaatgcacatagtgtattctatagctgccaggtttacttttttttttttaaaggaaactgtaagttacactgtggttaagacttgtatcttcacccttgaaaaagcccacattctatcacagtgatgtatggtcagacttaacagccccaattgttaaacacttggatcaagtcataaccagttttattgcaaaaggaccctgt

SEQ ID NO: 1714 - DNA, 278 bp, Homo sapiens
accgccaggctggaagcagtgggccagggaattctcagaacagctttctagttcaagaggtgatggaagaagagtggaatgctttgcagtcagtggagaattgtccagaagacttggctcagctggaggagctgatagacatggctgtgctggaggaaattcaacaggagctgatcaaccaaggcctgtgatacttgggctgtgatcctctagagccagcttggactcacatcattctatggggttgaagacaactcattccctctgaggagccttgt

SEQ ID NO: 1715 - DNA, 534 bp, Homo sapiens
acatcataaaaaagtgcttgtcctgtggcctcagctgggaggccctggcgctggggctaaggggcccaaggcaccatccaaaggctgggaggaaagaacccaaacccaggccctcctcctgccctccagcctttgacaggcaactcatttggcatgatctgttttggtgtgtttaaaacatacatttgcatgtgtctagtgtaaagcaacaagtttgaggaaataagtggaaggagagaggaagttccagttagatggttccactagtgtctactggtaattggcaaaactatgagtgttgctaacctgggctgagggcacctctgcctgtgcaggcagctgaccaggcttggagaatgagaaagggttcccaaggacaggatgccagcgggattctttgttgcaaactgcacacagtgcaatttttgggaagcagggatggggagtgggcatgagaccgggttgttgggaccactctggggtcaggccctgggtgaggcacaggaggctgcacacaggcacttggtgggttct

SEQ ID NO: 1716 - DNA, 491 bp, Homo sapiens
  misc_feature 478, 479: n = A,T,C or G
acctggaagataccaccacgtgtcaattacaatatacgtattccttggtcaattctgatatcacaggaccggaaaaaatagctgcttggtgtctagattgtttgggtattaaaaccactgcacatggataagctatttgttcagtcggagagaaagggcatagagtgacagagcaacaaaaagacacacagagaatgtatttcttgtgaaagaaaagaatgaaatgaaatgaaatgtagaaaccctaatggccttttgctttggaaaattaactccacaagccactaaaaatactatcaattagatcagaaaagacattcggtatgtatgtgttcctcaagcattttagaaaggggatatgctataacttccctgttggttccagattcaacacagcacaaagcaagaaaacttttatttactacactcacaagtatgattaagtgttcctgtttactctggtaggttaaaatatcanntattagttccca

SEQ ID NO: 1717 - DNA, 180 bp, Homo sapiens
acagttacaggaaattaaaatgttaaagtaacctaaaatgaattcagaccaataaaatcaagggaaatacaagttgattgcattacttctgtatgttgcttgctattaaaaaggttaagaggccaggttacccaccagtccttgcactgttctgacactttccccaggaggaaaacaagt

SEQ ID NO: 1718 - DNA, 478 bp, Homo sapiens
  misc_feature 451: n = A,T,C or G
acagattatttgttatgacaataaaacactcaaaataaatggtctttagcatctcaaattccaactgaaatcattttagtattaactcttcttcccaaagcaatgtctcatttcttggctgtgcaggtgatgccatgttatatccaataactagaaaaatcactgtgctgaacttttatgtttagcttccaagtatttttctaatgttttgcatttcaagtggtatcactgttaaatgccatttgttttcagattgtggccttttattattggctgctagatcctggtgtttctatgttcttttttaagcaccaaaaagaagatggggaagaaaagaaggaaaattttctgatataaatatgttgttcaaattatgagtattatttaaaaaagaaaaaggaacataacccaggagtctaagttaaatctaatattgttaatactgaacttncaggtccaggttggtatacattccacc

SEQ ID NO: 1719 - DNA, 440 bp, Homo sapiens
  misc_feature 404, 406, 436: n = A,T,C or G
acttcgtgtgctccgacccatggtgacgatgacacaccctggtggcatgcccgtgtatgttggtttagcgttgtctgcattgttctagagtgaaacaggtgtcaggctgtcactgttcacacaaatttttaataagaaacatttaccaagggagcatctttggactctctgtttttaaaaccttctgaaccatgacttggagccggcagagtaggctgtggctgtggacttcagcacaaccatcaacattgctgttcaaagaaattacagtttacgtccattccaagttgtaaatgctagtcttttttttttttttttttccaataaaaagaccattaacttaaagtggtgttaaatgctagcttccagcttgaaagtaaaactccagtgtggagtgaattttntntctaattataaacctgtaaccaaaactcanacat

SEQ ID NO: 1720 - DNA, 344 bp, Homo sapiens
  misc_feature 323, 333, 342: n = A,T,C or G
accaaggcgtttttcaaaattaaagacggtgcagcattgcatattttaataaaggaaacaaattttgtttcaaagaggtctgaaattttaaaatcagaccaaccagtgggtagatggaatttagtagatagttttaaaacaagcagctggttcaaatggagagctgggggcaaacagaaaccatatggaaaaacatcaattctcaaaatcctaaactgatcatccaaggctgaaatctataactttcccccagctggatctcattctactttaagcatggccaaaaaaatttatgttacgcactttacttgctccaaaatgtnaggaaattgngtgttattnac

SEQ ID NO: 1721 - DNA, 341 bp, Homo sapiens
acactctcagaatacagaaagaatccatcctatcatacatgtttcatctttaaaaataatctaacatagtcatactctctggctagtaacaaactattaacatcttctgagaatacagagaaaactctgggattaatagtaaattctctgacgtgctgcccccctcccccattcagcatcatctatgaacacatttctgcaaaagcatccccaaatcatccgtaactaggaaaagaaatggatatgttggtttcaccaaatggagttttagctagaaatgatggaacatttttaccttggcaaaaatgaagcacaaacgtgacatttgacaggttcgggcc

SEQ ID NO: 1722 - DNA, 538 bp, Homo sapiens
  misc_feature 215, 219, 221, 233, 265, 267, 287, 333, 376, 425, 457, 520: n = A,T,C or G
caagctttttttttttttttttttttttttttaagttgacttttaatgagtaaaaataaaaacccctcacaagtcaagtttactcagtagccaatagcctaaaatgaaattttaattttgcttgttcacataattttgggttttttttccccttctctgttctgacttctctcagtcgagccttggcgacaggaaaagaaaaaaaaaaaggcgtntttntnttcatgcccctntcaccccagtaaaaagtaggagaaaaagaatncncagattaaaacagaattgtnttatacattcacttttgagttatcaggtgaacttaattcactccanaacaatcacagagacaaagacaggcaagctgggttttaggctntcacccttgacactccaaattgtgctgggagtggccaaggctttgttanaaatggccctaagggtatatacactgcctcanctgccttgggcttcatgccctgggctcctccaccagggccagccccaataggtctttaattcnaggtaaaggttctgctgt

SEQ ID NO: 1723 - DNA, 267 bp, Homo sapiens
acaagaatattcttgtttttaggaaagatagttgtatgtgtatctatacacgtctgtgtgtgtacatatagagggtgagcatgagagggagatagggaaaagaatgagaaagccaatgtggctacgcacatcattaatatttggggaatctgggtgaaaggtatatgggaatctgaaattatgtcaaaaaagtttcaaaagtttctcttcattgaattaatatgttgttatacattcagtaagcaaactattgtattggatttgggt

SEQ ID NO: 1724 - DNA, 443 bp, Homo sapiens
  misc_feature 419: n = A,T,C or G
acagggttcttcctccctgatcttgcgttttgttagggctcggctgagctattaaatttgccttagctctctgcgggctgccatgctgattacatttttaagagtaagataatactgatttgaccttcagaaatacagaggttggatgcggattttctaactcaaaactaactctgtttcttacatttagtgccaggaacaaaacaaaaacaaaacataaacaccattaacattggttgaactaagctaatcaattaccaaactgtagaatgctgcccttcggccttcaaggaggaattcctactgtttatgaagatcgggtttgggtttttggtttttttttctttttcttttttccgtggtggtggtgggtgggcttttgttctttttgttttttctgtggtggtggtgggtgggcnttttgttctttgaaatttttttgc

SEQ ID NO: 1725 - DNA, 561 bp, Homo sapiens
  misc_feature 547: n = A,T,C or G
actccaacctgaatgacaaggaatgaaccctgtgaattggaagaagagtatttcagacagagggagacagaagtcctaaggcctggagccaagaatgagcttaaagtgctccagaatcagaaagaaaatctgtgtggctggaaggctgtgatcaaagaacagaatgaaaggagatgaggccaaagagataaataaaaataagcaggctgcatatttcagggatgttgtaggccctaatgaggagttttcattttagtgtcatgggaagacattgatgagttgcaaccagggaactaacatgattgattactttttttggagtggtaacttttcccatataccctttactcaaattcaccaactgtttacattttaccctcattcctttcataattatctctttctcacatgcacacacaccacacacattttatatacacagttttttctcaatcatttgagagtaaattgcagatgattgtgtcctctcactcctaaatacacttcacgtatgtcctaaaaacaaggatattctcttagattgtcnaaatcggaaaattt

SEQ ID NO: 1726 - DNA, 309 bp, Homo sapiens
attattctcatcacaatacggtaaaatggccaataaagcaaacacttccggtgactttgagaaagatgatgatgcctgtaagactgaggacagcgatgacatccattttgaaccagtagttcaaatgcctgaaaaagtagaacttgtaacaggagaagaaggtgaaaaagttctgtattcacagggggtaaaactatttagatttgatgctgagataagtcagtggaaagaaaggagcttggggaacttaaaaattctcaaaaatgaggtcaatggcaaaccaagaatgctgatgcaaagagaccaagt

SEQ ID NO: 1727 - DNA, 454 bp, Homo sapiens
  misc_feature 322, 421, 439: n = A,T,C or G
actagcaaaagggtctgatcaaaggtctcctgtggagcttgcatggttccctttcatactacgaccataattaaaaccactaattctcttttaaaatgctgcaggatgccatgtaggcatctgtctggagtgtcctttgtgatgttataagctgttaaggaccagtgccgagggcttttgagtgaaatgccagtcatgaaggtgcttcaagacaagggtgcctctaaaagcttgacagggccttgactgcacaattcgagctgaatttgccccttgtcagctgccagtaaataaatctcaaagggggaaaagctgaagtttnattacctgatccatggggctttgttggttttggcatcacacaggggaagctcttgcccctccattctctggatttgaagatgtccattggagcctgcantgcctggacagggttcanagcggaaccttttga

SEQ ID NO: 1728 - DNA, 181 bp, Homo sapiens
acccggaggtggagcaacagaaattgaattagccaaacagatcacatcatatggagagacatgtcctggacttgaacagtatgctattaagaagtttgctgaggcatttgaagctattccccgcgcactggcagaaaactctggagttaaggccaatgaagtaatctctaaactttatgca

SEQ ID NO: 1729 - DNA, 522 bp, Homo sapiens
acttatactcctgacctcagccccacacactctggttttataaagctataggacagagcagagatggaactgaaaaacagggtagaaaataacataaattggaggggaacagtgggatgcagaaagaatgacaacagccacatgtgccccagtcaaatacttttagtccctgcagcagaagatgccaaccaagtctctatactggctggggatcctgccatggatgcaggagaaaaaattcaatcacaagggagtaagtgacaacaaaaagaaaaaactctgagccacagctacactgggaggggggaggaccagattttgctacttctgtcacacaagctagaaaaaccctacctctcccattgggcaggcaacctgacattccacccagttccttgccttaccatactatgtattcctcctcttggagaattaagacctgggctaaatgctccactccaggataaggctgagcagtcctagttctctagactgcctcttttataaagattggattaaggt

SEQ ID NO: 1730 - DNA, 273 bp, Homo sapiens
actccacaaaacactacagacagtaacaaaataattcaataaatattaaaaactttcaatagaattataggacacttttttatcatatgtgagcatcaacaatgccacagccattagatatactattaaacacagtcatagatatctttcttgaataatggacataataaattttttatcaaggagtcataacatttacacatatccatacacaagataacagctcagaggaaatgaagcagactccccagtgacctggtttcatctgcctgg

SEQ ID NO: 1731 - DNA, 502 bp, Homo sapiens
gttctggcggggctgttcgtgatggtgttgatcctcttcctgggagcctccatggtctacctgatccgggtggcacggaggaaccaggagcgtgccctgcgcaccgtctggagctccggagatgacaaggagcagctggtgaagaacacatatgtcctgtgaccgccctgtcgccaagaggactggggaagggaggggagactatgtgtgagctttttttaaatagagggattgactcggatttgagtgatcattagggctgaggtctgtttctctgggaggtaggacggctgcttcctggtctggcagggatgggtttgctttggaaatcctctaggaggctcctcctcgcatggcctgcaatctggcagcagccccgagttgtttcctcgctgatcgatttctttcctccaggtagagttttctttgcttatgttgaattccattgcctcttttctcatcacagaagtgatgttggaatcgtttcttttgtttgtctgat

SEQ ID NO: 1732 - DNA, 189 bp, Homo sapiens; identical to SEQ ID NO: 1535

SEQ ID NO: 1733 - DNA, 285 bp, Homo sapiens; identical to SEQ ID NO: 955

SEQ ID NO: 1734 - DNA, 502 bp, Homo sapiens
acagaggaaacaatgcgtaactctgatggaattgaagtcatgaggcagcagagagcttaaattacagctttaaaaatttttattttttagagggaatttacttgggagtaacagcagtaatagttaacggagccagaatgcttgagtcatataattgcaaagcagagttgggagcaacagatgctaaagagtagttgctgtagttcctctttgggtcgtaggagcagttgtcatattactatatagctactgcatgaagaagagttcttagtgaggcctgggtgaacagctcttcttagtattctgtgtgaccccatttgaccttttaacaaatccctaagtaaataaatagcccctcaggaaaactaagtttttctctgctgtttttttgcttgagagagctataactgtaatagacttatatttctgaacattttagtgcttgccaatatttggtaatatttatgtttcctatatttgtaatgaacattcttcttccggt

SEQ ID NO: 1735 - DNA, 549 bp, Homo sapiens
  misc_feature 477, 478: n = A,T,C or G
actactgttaatatctctaagaacaaaacacattgaacatccttccagaaagtctttgagggaggacctatacccataatagaattatggcactcatttctgacagtgatcaagaaatcagttatttccttactgttggaaggacattgtaaagtatgtggttatatgcagtgaaactgcagaaaatactcctggttgaggagttttcactttactacagtgatataaaaaccagcagtttttacactaaattttttaaagaaatattagacaaaaatatagaattaaaacctttggttccaaaatgggaaaggttccacgatacataaatcatttctcatttgctttaaaaaaatttaaaagtgtaaaaattatgagagactttattcgttaacaatgggggtaaagagctatatacatgaaaatgagtcttataaaattaagtgaagtgcaaataaaagcactgctactataagnnattctggaatggttgtttaataagggtattatccatttgatctatagcaatgtgattttatttttaaaaag

SEQ ID NO: 1736 - DNA, 526 bp, Homo sapiens
  misc_feature 209, 210, 492: n = A,T,C or G
acgaaaacatgagcccccacgatgaggaaaaaggcgcatatcagagaaaagaaaaatgctgcgatgatccaatggcaggagcagcgcgcatccactttctttgtttttttgagatggggtttcgctctgtctcccaggctggagtgccgtggcttgatctcagctcaatgcagcctcaacctcccaggctcaagtgatcttcccatctnngcctcccaagtagctggaactacaggcgtgcaccactacacgtttactttttgtagaaacagggtctcacaatgttgccaaggctggcatcctgaagggcgggtggggcttcatcctacagagatgaaaggcagaagaagctcagagcccaaagcaaaggggtggaggacaagggcatcttcagaacagagtggctcggctgagacatccagtaggatgccaccaggcagaggtgtggtggaaaaacacagggccacagggtgaatgctcacatgtgaggancaaaccaccacagaacacaacagaaacacggtgt

SEQ ID NO: 1737 - DNA, 256 bp, Homo sapiens
actgacctggaaagttaaagatggaatcactcaattactattctttttgtaaatttctaaacaccataaagcatttaatgaactggaattgataggtgaactgtgtcattttaataagcataatgtaatcacgtcatattttgttttgtttgcaggcagaaatttagataaggatatccttaaacagctgtttatagctactgtgacagaaacagaaaagcagtggacaacacgtttccaagaagatcaagtttgt

SEQ ID NO: 1738 - DNA, 277 bp, Homo sapiens
acacatgaaaatcttgccaaaggtgaagtctaggaatagggagggactccgttaatctcactattatatagcccattaattactcataataggatggatttaggctctcattcagctgaacaatgaggatcctaaagaatgctaacacaaggttagcctgaaaagttctaagagatagggagaaggttcttaaacagggaaatctcaggacgaaaacaatgttccaagaagaataaaatggcaacagtatatataatatagaacagaattagacagc

SEQ ID NO: 1739 - DNA, 514 bp, Homo sapiens
  misc_feature 485: n = A,T,C or G
acatcttgcctagatgtcgatgactgcaagtaataatacagtttataatgaaactatctacaattcttgttttagcacatctgttatccgtaaaacacctgtaactagcttttttaatttattatttgaattttaggatagcgaatcactaatttttagttgctgaggttggcattttagtgattattaagcacttctgtcagtctttgaaaaaagaacgtattttttgtgctttgaagatctctgaagaatttcttttataatagaatgggcatgtattgtaacagttttatgtcaaatgatctgtgctgtagaaaaacattaacccttgttcaaaaaagaaatggataaacttggcctttctaagtggtaagaatgacctgtcactataatatactgtatgtttacattttatttaaatttaatctcttatgtatagggtgataaccttccccagaacaacagtgattgcgattgttttctanaaacttctttaaagtgccacatttggcag

SEQ ID NO: 1740 - DNA, 233 bp, Homo sapiens
  misc_feature 127: n = A,T,C or G
caagcttttttttttttttttttttttttttgaattttaatatgatattttattatgggtgtctgtaaggaaaaaaaagatcaacaaccacatacaagcttacaaagttaaatttcaacacattctntatgctagtgtgacaaaagcagccccataatttggtttttattgttgacctttacaggatgaaggaggagaatcccgtggcatgccaatgaatctttctgatggga

SEQ ID NO: 1741 - DNA, 179 bp, Homo sapiens
acagccttctttactggtgtataacaatgcccaagggctggatgaactacataatcaaaatcaaatgacagctttctacagacttggccaaaatagtacatcaccatcttgtatgtgagggatattgtgtcagaggggaattacactttcaaaataaccagggctagtaggtcattagt

SEQ ID NO: 1742 - DNA, 508 bp, Homo sapiens
acactgagggaactgagacactcaaaagctctgaaagctgagccggctcccaaacaccaccctatgtcaggagcccagaaggaatgggtttcaagtcaattctgtttgaaccaaccctctcctagttagtgggcaggagagagccacagccctcaggccagtgtggggacaccactcccagggccatagaggggtccccagggtgtcttccctcctctagccccgggcctgggagactctcaacatgggagtctctggacctctctgtggtggccccacaggccacattgcccttctccttttctggaagactcagggccccagaggtcctgtcctagaccctctccttggccatctgtcaatgagcccaggcttggggtccctcaggagattggggggagggtagaagatccttgcagggggaagcaatggtcaaaaaagggtgtcaaagccaagggtcaagggtgataccaatgtcatcttactaacaataaaaataacaatagct

SEQ ID NO: 1743 - DNA, 379 bp, Homo sapiens
  misc_feature 338, 372: n = A,T,C or G
acactgagggaactgagacactcaaaagctctgaaagctgagccggctcccaaacaccaccctatgtcaggagcccagaaggaatgggtttcaagtcaattctgtttgaaccaaccctctcctagttagtgggcaggagagagccacagccctcaggccagtgtggggacaccactcccagggccatagaggggtccccagggtgtcttccctcctctagccccgggcctgggagactctcaacatgggagtctctggacctctctgtggtggccccacaggccacattgcccttctccttttctggaagactcagggccccagaggtcctgtcctanaccctctccttggccatctgtcaatgagcccagncttgggg

SEQ ID NO: 1744 - DNA, 238 bp, Homo sapiens
acagaaaacattagaaaaaatttattacagaattctaattccagtatgaatagtggaaacccatctgtaaattagatggatgttggatggaaaatgacattgctaaatttgagaatttctttttacctactaatgtagattgctttgtataataaaacacagggtttggaaggttttgttacagggagcatggtctgttgaagatttttaaaatgtatttttctagattaacttctgt

SEQ ID NO: 1745 - DNA, 202 bp, Homo sapiens
actgcctatttggggtatcatcattcttcgggggccccacagggaaccttttgctcaccggggccggcttgtcagtctcctgagagctgccttgattcaaatgctctttgatggcctgctcaatttgttcctcttcctgcaggtcatcttcagatgagccttgaccaggaactcgcttcacttggtttgaattaatgatctc

SEQ ID NO: 1746 - DNA, 411 bp, Homo sapiens
  misc_feature 370, 387: n = A,T,C or G
cgacgacctcatctccaagtccttccagggcagtcaggggcgtgcctacctcttcaactcagtggtgaacgtgggctgcgggccagccgaggagcgggtgctgctgaccggcctccatgctgtcgccgacatccactgcgagaactgcaagaccactttgggctggaaatatgaacaggcctttgagagcagtcagaaatataaggaaggaaaattcatcattgagcttgctcatatgatcaaagacaatggctgggagtaatgtgcgaactttcccttctccttcgaatgctgttttgtgaaagaaactgtgaatgtaatggaaacgtaggagcatctggtgacagcctttcttgccctctgacctcanaggctagctgcgcatanctcttgacactcccggccatctct

SEQ ID NO: 1747 - DNA, 282 bp, Homo sapiens
acatctcatatacacaataatgacaaaacgcctactcagtcaaagcaaacagatgcagaaaaatattatgggagatctcctttttctttctttttccttttactatttgaataactttggttccaaccataaaaatcacaacttagcaaatttcatttaaatgccttttttaataatttcttcatgttcacagaagtttcactgaccatttttataagtttaaggtccagatgcaatgcatattgtataaaagagagcacttattgtttaccttgcatgaat

SEQ ID NO: 1748 - DNA, 191 bp, Homo sapiens
acagtatatgaggtaaaatcaagattacattaaaaattgttttctcctctgcactaattttgcagtgaggctcaaatggcaagtatactattaaatgacatttactatcaaaaataggaagttcatttgaattactatgaaaaacataagccactgtaacttgacacagtggcacattttaccattttaga

SEQ ID NO: 1749 - DNA, 383 bp, Homo sapiens
acagagtcttttgcttcctcccacccctagggggaaaaactgctttgtgctttgggaagttgtctctgaaacccggggacagaggacgcaggacagactaggagggagccgggaggatgggctgcagctgtggaggagggtttcagaggagagaggtcggagagcacaggcctgagaagccagaggcaggtggagagagggtggaaagtgagcagcgggctgggctggagccgcacacgctctcctcccatgttaaatagcacctttagaaaaattcacaagtccccatccaaaaaaaaaaaaaaagaaaaatatcaaggaataaaaatagactttgaacaaaaaggaacatttgctggcctgggggggcatctcaatttcta

SEQ ID NO: 1750 - DNA, 460 bp, Homo sapiens
accaattgcttcaagaacagaataaggtggagaaaatgatttttcattactacttctagaaactgtttatttaatatgtgagtaccatttaggaatgactggaaggaactaaaatcatgactggtgtgttttcctgccttttcccccttcttattgcaactgaagtttcatctttcaaagaagaaaaaaatgacattaataagttaatacaattttgaagaagtaagaagaaggaattttctgttcttttagggctgtctccacatggaccctactgaaaggctgacatgtgaacagctgttgcatcacccatattttgaaaacatcagagaaatagaggatttggcaaaagaacacaacaaaccaacaaggaagaccctaagaaagagccgaaagcaccactgctttacagaaacatccaaggttataatttgaaatgatctcctacctgccacctggt

SEQ ID NO: 1751 - DNA, 365 bp, Homo sapiens
acaaactcgcattcatggcttggtttcccagaagatctccatttaacttttttaaagaaagtttattgctttctttaacctgcattttttctaagttttttttcacataaaggtgctgtctttgtggcaaggcctaggcatgacaatcggaggactcgagggggatggaggactagtgatcggctggctgcttccagtcgattagagaggtgaaaaagctgaacgtgtgccagtaatcttcaaaaggcagaacatatcacctctgccccgtaaactgttctctccgagggaaaaaatggaagttatcctcacagttcactgccgtggtatttcttctgtcccatgctttgcatgactgccatggt

SEQ ID NO: 1752 - DNA, 368 bp, Homo sapiens
actttggaattgtcccatattaatcagagatggcaaaagaaaaagttctcatattaccaggttgattttgtgtctcatttcaaattttaatttaaaattatggttttcatttttgtttaccttaaagtgatgcttaaaagtggcatgtaattaggacacttaggtttgttgaaagcattttcgacatttgtataaaagaatttgtgataaatatatccaggtgctcaccaaagaaacatgtattaacaacttaaattagatttttctaactgatagttttcactcatttataatcagtaggagagactgtctagatgttggggcagctctatgatttaagtctgtaacatgttataactgaatttagt

SEQ ID NO: 1753 - DNA, 397 bp, Homo sapiens
  misc_feature 176: n = A,T,C or G
actaaaaccaaccagccaaagaacagcttcaacagaaagttatgtccaaaggggaagagggaaagaaaaaaagaaaaatgataagaaaaatgctaactaaggtaaaacggatgatgatggggaatgggcagtcacaaatgttcacagaaaataggtcagttagtaagatcttctgnaaaaagcctacacacttcagtcaagcacatcagtagaatgatttgggagcataatttttttttcggccacttgtgatttcctccaaatgaaaaggaatctgcaggctaacaagctgatcctcatcagccaagctggttcatatgcacactgctcatgtgaggtgcccagggtccagtccacaccgtttgagggccattattttccgtggagctggaaacca

SEQ ID NO: 1754 - DNA, 345 bp, Homo sapiens
tccagttcgcccgttcctggcctgacccccaccaaggcccataccgcagtaggctcctcgggctgcccctcggttgacaatggtctccaggatggtctctaccatgctatctggcctactgttttggctggcatctggatggactccagcatttgcttacagcccccggacccctgaccgggtctcagaagcagatatccagaggctgcttcatggtgttatggagcaattgggcattgccaggccccgagtggaatatccagctcaccaggccatgaatcttgtgggcccccagagcattgaaggtggagctcatgaaggacttcagcatttgggtccttttgg

SEQ ID NO: 1755 - DNA, 543 bp, Homo sapiens
gccttgctacattggaatctgtcttccaagagctggggaaactgacaggaccaaacaaccagaaacgtgagaggatggatgaggagcaaaaactttatacggatgatgaagatgatatctacaaggctaataacattgcctatgaagatgtggtcgggggagaagactggaacccagtagaggagaaaatagagagtcaaacccaggaagaggtgagagacagcaaagagaatatagaaaaaaatgaacaaatcaacgatgagatgaaacgctcagggcagcttggcatccaggaagaagatcttcggaaagagagtaaagaccaactctcagatgatgtctccaaagtaattgcctatttgaaaaggttagtaaatgctgcaggaagtgggaggttacagaatgggcaaaatggggaaagggccaccaggctttttgagaaacctcttgattctcagtctatttatcagctgattgaaatctcaaggaatttacagatacccccagaagacttaattgagatgctcaaaactggggagaagc

SEQ ID NO: 1756 - DNA, 388 bp, Homo sapiens
actattagatatacatatttaaaaaaatatttaacttatttttatgaagaaattaaatattttctgaaaaagaattattttattattgttctctagcgacaaacctcaaacaattctcatccaactcaactaactcatttaaataactttgctcaatggcaacttctctaaagatctagtttacacaattctattctacataacactgtttaccctgttacatagtatatagttaaagaacatttttgtaataaacatgtttctctttgatatgatacataacaatattttcacacttcccagcaatcactcaaatatattaaaaatgtatccttctttaaaaggcacacacatttacaggttcaaatctttattgttttaaaattgt

SEQ ID NO: 1757 - DNA, 461 bp, Homo sapiens
acaaaaatcacaagcattcttatacaccaacaacagacaaacagagagccaaatcataagtgaactcccattcacaattgcttcaaagagaataaaatacctaggaatccaaattacaagggatgtgaaggacctcttcaaggagaactacaaaccactgctcaaggaaataaaagagggcacaaacaaatggaagaccattccatgctcatgggtaggaagaatcaatattgtgaaaatggccatactgcccaaggtaatttacagattcaatgccatccccatcaagctaccaatgcctttcttcacagaattggaaaaaactactttaaagttcatatggaaccaaaaaagagcccgcatcgccaagtcaatcctaagccaaaagaacaaagctggaggcatcgcactacctgacttcaaactatactacaaggctacagtaaccaaaacagcatggt

SEQ ID NO: 1758 - DNA, 311 bp, Homo sapiens
  misc_feature 273: n = A,T,C or G
acaaaccaacaggcagcctttccgcccttgcggagggagagactagcatcatcatcaagagataaaccgaagtgtgctggaaaacacacgagctctttagtaagagcaggcgacatgcaaggaaccatagtaacaggaacagaggtcctgaggctggatatggaacccaagtttgaggatgaccaactgagaccagtgttgctggagcacaaagtgccaaggagagaaatggcaggctaaggctggaatatgcaggtatgaagcgcaacctgngttcttctgtgccatgtgaaaggttctgctcttgaccc

SEQ ID NO: 1759 - DNA, 526 bp, Homo sapiens
acaacctcagacaccattttaaactgcaagaaatctgagcctttcatagtcttgctttttattgttgacattcacattttaatttttatgatcattgcagattcacattttaaaaacccaagaaacaaaaaagctcttattctaatttagcaaaaagcagaatcatcggtgtgaagacaatacactatctacatacagctgctttgtatccataattatctatgtaagaaacatactgtcattcacagggactccatttacacgtgcacataagccatgctgaggcctaacaggtaatgtgggttttcgtctagcatcttctctttactctggatccttatcctcatctgaaaaatgggggacagacttctttgcaacaacattatccagtctctgtccttgtagatatggattgacactcctccgctttcgtctctctcctcccttcatcttctcgtaaaggagtttcttgttccacttgcccaagcctggatagtcatgttccggatcaaagagatgctggtgc

SEQ ID NO: 1760 - DNA, 527 bp, Homo sapiens
  misc_feature 472: n = A,T,C or G
acgaaaacatgagcccccacgatgaggaaaaaggcgcatatcagagaaaagaaaaatgctgcgatgatccaatggcaggagcagcgcgcatccactttctttgtttttttgagatggggtttcgctctgtctcccaggctggagtgccgtggcttgatctcagctcaatgcagcctcaacctcccaggctcaagtgatcttcccatctcagcctcccaagtagctggaactacaggcgtgcaccactacacgtttactttttgtagaaacagggtctcacaatgttgccaaggctggcatcctgaagggcgggtggggcttcatcctacagagatgaaaggcagaagaagctcagagcccaaagcaaaggggtggaggacaagggcatcttcagaacagagtggctcggctgagacatccagtaggatgccaccaggcagaggtgtggtggaaaaacacagggccacagggntgaatgctcacatgtgaggagcaaaccaccacagaacacaacagaaacacggtgt

SEQ ID NO: 1761 - DNA, 218 bp, Homo sapiens
  misc_feature 210: n = A,T,C or G
acagatgggtttttggtgtggatgttcttcctgttttgttagttttccttctaacagacaggaccctcagctgcaggtctgtcggagtttgctagaggtccactccagaccctgtttgcctgggtttcagcagcggtggctgcagaacagcagatactggtgaaccgcaactgctgctgcctgatcgttcctctggaagttttgtctcanaggagtgc

SEQ ID NO: 1762 - DNA, 182 bp, Homo sapiens
actgcagctggagagattgttgaagcagatgttgccattgggaaaggcgatgagactccacttacaaatgtgaagacagaggcatcccctgaaagcatgttgtctccatcacatggctcaaatcccattgaagatcctttagaggcagagactcagcacaagtttgaaatgtcagactcatt

SEQ ID NO: 1763 - DNA, 568 bp, Homo sapiens
  misc_feature 500: n = A,T,C or G
accaaagacaaatgcaactgatatggcaaactgccagtctaagtaaagttttgcacagcttacatgatactgtatgaatgtatgaaaaaaaaggagaaaaaaaagaaaaaaaaggtcagggttagggatcttactgaactgtgaattttatttctgtttgggtccaattatctacagaaggagcatccatacatacaaatattattttgctgttcctctagttcgcttccatagtagataagttggtggccatttagatgtcttttatttctgcacttattgtaggaaattttaatatatttcattttagtaagctattgataaaatagtttttgactttgaaaattaaaatgtttatttagcttattgtagtatacttccaccagacaacaaaatagattatttttattgtattatgtatatatatatatgtaaagaaagaaaaaagctaaaaatatctaattctttagttgccacttttccaattgatgtattattgngcatgtaatattttcaaagatcaacacaggctaaaacaaaaacaatttatagatttttatatttttgt

SEQ ID NO: 1764 - DNA, 253 bp, Homo sapiens
  misc_feature 200, 208, 209, 225, 248: n = A,T,C or G
acttacttattcatgagagtagttaagcaaaaataatttgaccatgtatcctctagataaatattttgatgaaaactggacatggctagcatttttcaaagatgcagcagccactgtttaccttagcttgagtcggatggaagctaagtcacctttgaaataaattactgacagcttcattacagattgccctaaaattnaaaaattnntatagaaaggattctnctccctaagcgagccagcctgtnacacc

SEQ ID NO: 1765 - DNA, 147 bp, Homo sapiens
actgtataagatgagctagtttatcactttacaacaagtttatatggaatagaaccaacagcaacctcatatttcacagttcatgggaaatcccactaacatctgccacgcacagccaatgacccctatggacagaccccttcctgt

SEQ ID NO: 1766 - DNA, 243 bp, Homo sapiens
accaggttataacctggacagtggagagtgtctgccttaggctggtttgtgcaagagggccaccttaggtctccttgaggacatttatcttggcgcagatcttgagggcagggcccagcttgatgttcatggcactcataagatgttcttctttaagtaataaaagggcctgtccatcaatctcctgtgagcgaaattcctctgcaatctcttggcagccttggagagaggcaataaactcgt

SEQ ID NO: 1767 - DNA, 558 bp, Homo sapiens
acataatgaggtatcttggggatgagatccaagtctaaacacaaaattcatttatattttatatataccttgttcacataccctgaaggtaattttatataatatttttaataatttgtgcatgaaacaaagtttgtatacattgaactgtcagaaagcaaaggtgtcactatcttagcgacccaagtggtggtgtcagcactcaaaaagttttggattttggggtatttcagattttagatttttgtatgaggaatgttcaacctgtatttgaacaagcattaccaaatatcattgaatattaatatcttttgcgtaaaaactgctattatcagcatcatagtttctctaaaaagaaaacttggggatcatagccgatagagagacttgctaaaatataaatcagcctctgcaaaactgtttacatatttattggtttacatattttattggtttatttctatcccctgttcactttttctcttccacttccaattatgaagagaaaatatttgttcagggttgtccccccgccccccgtcactgcataatttctcc

SEQ ID NO: 1768 - DNA, 525 bp, Homo sapiens
ctcagatacggctaaacccagtttacaaagcagtagtgtcttctgacaaatctgggatgattgaatactggactgggcctcctcatgaatataaattccccaaaaatgtgaactgggaatataaaactgacactgatttatatgaatttgccaagtgtaaggcttatccaaccagcgtatgtttttcaccagatgggaagaaaatagctactattggttctgatagaaaagttagaattttcagatttgtaactggaaaactcatgagagtctttgatgaatcactaagcatgtttactgaactgcaacagatgaggcaacagttaccagacatggaatttggccgacgaatggctgtagaacgtgagttggagaaggttgatgctgtaagattaattaatatagtttttgatgaaactggacacttcgtgctgtatggaacaatgctgggcattaaagttataaatgtagagacaaaccggtgtgtgcggattttaggcaaacaagaaaatattagagtgatgc

SEQ ID NO: 1769 - DNA, 385 bp, Homo sapiens
actgctgccgagaatccattttggatggcctgaagaggaccacagatgtgatgtttggtgggaaacaagtggtggtgtgtggctatggtgaggtaggcaagggctgctgtgctgctctcaaagctcttggagcaattgtctacattaccgaaatcgaccccatctgtgctctgcaggcctgcatggatgggttcagggtggtaaagctaaatgaagtcatccggcaagtcgatgtcgtaataacttgcacaggaaataagaatgtagtgacacgggagcacttggatcgcatgaaaaacagttgtatcgtatgcaatatgggccactccaacacagaaatcgatgtgaccagcctccgcactccggagctgacgtgggagcgagt

SEQ ID NO: 1770 - DNA, 503 bp, Homo sapiens
  misc_feature 373, 374, 480, 481: n = A,T,C or G
cccaggagttcaaatacagcctgagcaacattgtgagatctcatctctttattttttattttattattattatttttttttttagatgcagtctctctccatcgcccaggctggagtgcggtgagccaagatcctgccactccactccagcctggcgaaagagcaacactctgtctccaaaagaaaaaatatatatacaaaaattagccgggcatggtggtgtgtgcctgtagtcccagctgcttgggaggctgaggcaggaaaattgcttgaacccgagagacagaggttgtggtgagccaagatcatgccactgcactccagtctgggcaacagagcaagactctgtctcaaaaataaataaataagtaanntaaataaataaactaggtattttttttttttatcgaaagtggtgatgttttaaatgattgctttatatattggggtctaaatcttaaatatgtttaaattagacannttctatttgaaaaaattaatgc

SEQ ID NO: 1771 - DNA, 255 bp, Homo sapiens
  misc_feature 128, 231: n = A,T,C or G
actctaagctctctacttactgtgagaagttttctacattgtaaaattaaaagattatatttaaaatacttctttaggatgttattcagccatcaaaaaaaaaacccaactaaaatgtcttaccagtnaagtattattaaaagcctcatttgtggagattcgctgacttccttggttaagctgtcttgtatttacttaatttgtcccctcaaccaggtgttttcttttcancctgttactgtcctgtgccatttt

SEQ ID NO: 1772 - DNA, 252 bp, Homo sapiens
acacgcattagggagctaaagcagtgatttatctcacaattctttggagaatatggcagcgcataaggctcctaattctcccaggtcagaatcttcccaaggttgtaacttaaggcataaaggcataaacgggggagatttctgcccaggatttcctgcaaaactaatgacctcacttcttgcagtggaaggaaactacctataaaatggttttatttataaataattgttccccataaattgtcattaaac

SEQ ID NO: 1773 - DNA, 467 bp, Homo sapiens
  misc_feature 462: n = A,T,C or G
agacaaatggaaaattatactttgagtatataatttgttaaatattactttatatggtaattttatgtataatttcatatattggtaaaattcaaaactacacttgagaatttttttatcttaagtttggggtgaatggggtggatgagactgattgaatagaaaagggctaatggcccaaacattatatagatttctttttttcagtcagaggccttatttgatattttataaataaatgacagtttttatttttaaactttttattgtttttgggaaagtattccttaatttaatgacacattcattcagatacttcttatccctgctaataaaggaaatctatttcaagctacaccattgagattaagtctgaggcagttcattgaggcagctctactataaaagcttacttgataaataattatttttgtaaacaagttgggttaacttattcttcgnctttt

SEQ ID NO: 1774 - DNA, 560 bp, Homo sapiens
ccttgagcagatacaccgaggagttaaaggatttgtccgagaccttcaaggtaacccaattgcgaatgccaccatctccgtggaaggaatagaccacgatgttacatccgcaaaggatggtgattactggagattgcttatacctggaaactataaacttacagcctcagctccaggctatctggcaataacaaagaaagtggcagttccttacagccctgctgctggggttgattttgaactggagtcattttctgaaaggaaagaagaggagaaggaagaattgatggaatggtggaaaatgatgtcagaaactttaaatttttaaaaaggcttctagttagctgctttaaatctatctatataatgtagtatgatgtaatgtggtcttttttttagattttgtgcagttaatacttaacattgatttattttttaatcatttaaatattaatcaactttccttaaaataaatagcctcttaggtaaaaatataagaacttgatatatttcattctcttatatagtattcattttcctacctatattacacaaaaaag

SEQ ID NO: 1775 - DNA, 377 bp, Homo sapiens; identical to SEQ ID NO: 1246

SEQ ID NO: 1776 - DNA, 450 bp, Homo sapiens
cacacttcatgtaatgctacctgcaagtctccctagaaaagcagtttttgtaggtgaaaacaatgaagccaggtaatattgcaaggaggctgtaattttagcagacctaccaacaacactgatgtaggaagctcattattttaatttctggagccttttaattttttctttagaaagtgtataaataattgcagtgctgctttgcttccaaaactgggcagtgagttcaacaacaacgacaacaacagccgcagctcatcctggccgtcatggagtttcttgaaagaacgtatcttgtgaatgataaagctgccaagatgtatgctttcacgctagaaagaaggagctgcaaatgaacacttcatagcaatgtggaactccaacagaaaccggtgaataaagatcagtgtcccagagagagaccagaggagctggagtcaggaggcatgt

SEQ ID NO: 1777 - DNA, 382 bp, Homo sapiens
actcctgggccacctggcattaaggcaatggagatgagaccagtctagagccaacaccggtctctgaaacccagaagggctgcccaactaacagcacctccctcttggccaaaggctttgtctagggttgagaagcaatttggctgggtggtctcactgccctcctaaacagagcccacctctgcccccagagtcatctgtgctccaaagcaatgggcgggggcacagctgccaccatgccatgccttgggcattggaagagcaggacccaggagtgcagggatggtatcactgttgcccctttgaaaatgacccatttcccactttgggaggccgaggcaggtggatcacctgagctcaggggttcgagaccagcctggcc

SEQ ID NO: 1778 - DNA, 359 bp, Homo sapiens
  misc_feature 8, 10, 83, 144, 317, 345: n = A,T,C or G
acagattngnaaggaagaggactttatgcaactgtctccacaggaactgatctcagtcatttcaaatgacagcctaaatgtanaaaaagaagaagcagtatttgaggcagtgatgaaatgggtgcgaacagacaaggaaaacanggttaaaaaccttagtgaagtgtttgattgtatccgttttcgccttatgacagaaaaatattttaaggatcatgttgagaaagatgatataattaaaagcaacccagacctccagaaaaaaatcaaagttctaaaagatgctttcgcaggcaaactcccagaacctagcaaanatgccgcgaagactggggctggtgaggngaatggtgatgttg

SEQ ID NO: 1779 - DNA, 423 bp, Homo sapiens
acaatttgttatagtatagtatcaaatttctatatagattttatacctcagtggggaaaaataactgattccaatgacattcattttgttttcatctgtgatagtcatggatgcttttattttccttggggtgctgaaattgagctgaaaaaaaaaggctctttgaatatagttttaatttctctctacagttttttttgtttggtttgtgggctgttggaattgtaatttttaattgccttctaaaaaatggaaatttaacaatgtctgatctcagctgaacaaattagatgtttcagttgctcttgggtcaactggcttacagatttacatgtgcacacacacacaaatttctcatcacattttcgacttcttcacttgacctaactgattatgcgaaatacccaagattcatgctactgt

SEQ ID NO: 1780 - DNA, 313 bp, Homo sapiens
acggccttttactttgtgttccaattactccacatgtcctatagctgtatgcattttatatatttgtcattcataagcaaggaactcaaattttctgttcttaaaaaacactcaatttagtattgtttgacaggatggtatgaaaagttgaagatggagagaaaaaaggctggattgtaattttagtgaccaaaagagaaaataatatcctcctctaagattccttactctattttgtcaaagtggaagtaacttaactttttgctgctaattataagaaaattaaattcttgttaaaagtaatttgagtagt

SEQ ID NO: 1781 - DNA, 345 bp, Homo sapiens
  misc_feature 297, 313, 321, 322: n = A,T,C or G
ccaagatcccagcgttatctaactcctggagggtggactctgtcctggcttgtttggtgtcctcagatatctttcacacagtagagcaaaatcaccagccctgcactgatgtcactttatgtagaaaaaggccttagctggacctgcgttgccgtctatgcaaatgcatgcaaatactccaggccctgggatgtgggcttgtgttttgtcactgtgaagggggagatgggagaggagcctgttttggggtggggtctggggaaggcaatctgattctgaagctaaagagctttcatnctcttgagtgtatgtncccatagnngggccccttgacccacatgctga

SEQ ID NO: 1782 - DNA, 566 bp, Homo sapiens
  misc_feature 134, 188, 263, 369, 438, 465, 509: n = A,T,C or G
actcaagcctcccttataacacagatgtgtataaatcatggttcaagatgaaatgtttataatgctttaccacccacagggtgtcaactcactacattaaccagatgtggaaaagaatctcacttctgatcagntcctgaatttctgtatgattaatcacaataatacagaactttaaattacattantcttatataaatacttacatatcaaacgttttgaatcctacttatcaactagaaaagtgataaatcagaaatttnctttttctctattaagaaaaatgaatctagccttatgtccttattcagaaattgcatgatttagaagttccaagtataatgatctgatctgtgaaaacactaattnattaaagttaatgttttacaataaattcctttaaaacggagtttgaagggcttgtaaaatctcaatcanaagcaagtagaaacaccaaaggggcanatgtcttcgctgactaaaatatgtcaaaatgccataatatttanaaaatgttaaataccatgctaaaatattttcaaaggcttattttattttaccagaag

SEQ ID NO: 1783 - DNA, 89 bp, Homo sapiens
  misc_feature 18: n = A,T,C or G
actgttcacacacacagnttgagactccaagccaagagtgccacatccctatcctgtggccttttggaaatccaaattgcctgaacatg

SEQ ID NO: 1784 - DNA, 322 bp, Homo sapiens
  misc_feature 285, 294, 295, 312, 317: n = A,T,C or G
gctcagggcagcttggcatccaggaagaagatcttcggaaagagagtaaagaccaactctcagatgatgtctccaaagtaattgcctatttgaaaaggttagtaaatgctgcaggaagtgggaggttacagaatgggcaaaatggggaaagggccaccaggctttttgagaaacctcttgattctcagtctatttatcagctgattgaaatctcaaggaatttacagatacccccagaagacttaattgagatgctcaaaactggggagaagccgaatggatcantggaaccgnngcgggagcttgaccttnctgtngacct

SEQ ID NO: 1785 - DNA, 409 bp, Homo sapiens
accaaaattaaacagcattaggttcttaaatattgcaaagtgtctatttaagatttctcgggtgtgttcatgaaaaaggaactttcaaaaaagccattaaaatgaatatatcagctgaaaaagtgataactcattaaaatctctttattctatcactttcaaatgtagctgcaaaagagaaaaaatcttaatgtaactttaaaaaaatattagcttatgaataaaaaagttgagtggtgcattctttatgcatacagatttttaaactgatattgtataattctaatacatcttaacctctggactgcactgctgtagtaggaaatttttctgtctcagacaagaagtcatctaagaaaatgaaaacgagaaattttcaatgatatgcatgaattcaaaacaaaacagt

SEQ ID NO: 1786 - DNA, 317 bp, Homo sapiens
  misc_feature 33, 146, 150, 171: n = A,T,C or G
acaagctttttttttttttttttttttttttgnttttttttttcaattaaaaagccatttaacaaaagaccaatttacacattcctttgaattatgtccataaaaaatttaaatatacaaattacattatcaaacccaaaagaatntttntaaacaaatgaaatacagatntagacaaagtcaggatccaaattattttaaaaagtttttaaattattttgtaattacaaatgaaacaacaaactgacagttttatacaattgttaaagtttcaaaaagttcaatgatggagcaatagtatcacaatttatttaagt

SEQ ID NO: 1787 - DNA, 379 bp, Homo sapiens
accagtgaacctgacagattagtttgggactggggttctaatgttgatatgaatcaactttattccttatatagctggcaccaggtggtcaaaaggctgactataaaatacagatgcaggaggattgttaaaatagacataagtgcactgtgcaaaatacatctgtttacttaaatctatgagaaaattaaatgaagggttcaaacagaaattaacaattagtgaaaacagatgtagtgctttaaaaaaaaacaaaaacaaaaaactacagatataacacatttttacccggaactttgaaaggtaaaaagcgattgctatacaacatcataaaacattccagtttgttctgtcttcctttataacaaaaacaaaaagt

SEQ ID NO: 1788 - DNA, 510 bp, Homo sapiens
  misc_feature 165, 373, 374, 438, 493, 499: n = A,T,C or G
ttttttttttttttttctgtattttgaaaagtatttacttagtttaaataaattaattgcaaataaaaattaagctacaatatatagcctgaataaaaatgactagaacaaatacaacacaggacttgctttcttgcattagtcacaaagcatgtgacaatctanaaaacttcaaaatcaattacatttctttgaaaaaggggtaacagcagttactgatacatcacaactaataaacttataatacaagtttcctgacatgcatttcctgagtgaacccaaatgatcattttttaaaacaaggaagtttcgacagttgaagtaaaataaaataattcatggcttctaagcaacaagttttgttttttaaaanncaaaagaaaattcagaacagttttgtaataggataaattaaaggtatgctaccacatataaaantttgctacagtcagttaagtattatacaacttttcaaactaaaggaaaacaagtnaaaatnttaaaagaaga

SEQ ID NO: 1789 - DNA, 252 bp, Homo sapiens
  misc_feature 151, 204, 206: n = A,T,C or G
accaaaggatagctgttctgtttaagtagggacctctcatggcctacaggctttgacatctgagaatcaaactggagaacattccgaagccgttcttataagtgtctccatctctacctgggctgaaatggaatgtgcaaatgtagcccancctggtccttgggtgttgccagttgattgatgactgggagccaaagtggcatntnctttgacctaaacgggcgatgatgaaataaaactcagcagcctttc

SEQ ID NO: 1790 - DNA, 496 bp, Homo sapiens
  misc_feature 118, 119, 428, 430: n = A,T,C or G
acatctataaaaggaaaagtgatggcatctatatcataaatctcaagaggacctgggagaagcttctgctggcagctcgtgcaattgttgccattgaaaaccctgctgatgtcagtgnnatatcctccaggaatactggccagagggctgtgctgaagtttgctgctgccactggagccactccaattgctggccgcttcactcctggaaccttcactaaccagatccaggcagccttccgggagccacggcttcttgtggttactgaccccagggctgaccaccagcctctcacggaggcatcttatgttaacctacctaccattgcgctgtgtaacacagattctcctctgcgctatgtggacattgccatcccatgcaacaacaagggagctcactcagtgggtttaatgtggtggatgctggcncngggaagttctgcgcatgcgtggcaccatttcccgtgaacacccatgggaggtcatgcctgatctgt

SEQ ID NO: 1791 - DNA, 407 bp, Homo sapiens
aaaatattttaaaggtaaaacatgctggtgaaccaggggtgttgatggtgataagggaggaatatagaatgaaagactgaatcttcctttgttgcacaaatagagtttggaaaaagcctgtgaaaggtgtcttctttgacttaatgtctttaaaagtatccagagatactacaatattaacataagaaaagattatatattatttctgaatcgagatgtccatagtcaaatttgtaaatcttattcttttgtaatatttatttatatttatttatgacagtgaacattctgattttacatgtaaaacaagaaaagttgaagaagatatgtgaagaaaaatgtatttttcctaaatagaaataaatgatcccattttttggtgaaaaaaaaaaaaaaaaaaaaaaaaa

SEQ ID NO: 1792 - DNA, 148 bp, Homo sapiens
actactttataacaaatacattcatgaactgataatttccaaatgtttgctttaaagccccgtgacacttgtcacttttgtcatctccccattgatttccttttttctttcaactttcaaaatgaaattaacttatttactagctagt

SEQ ID NO: 1793 - DNA, 141 bp, Homo sapiens
  misc_feature 130: n = A,T,C or G
acgaaagtggttcaaagattataggtcatgcagatcatgctagacagtaaagaaaattgtgactgagaaaacactaaataaaaatacataaagaatgtgcattataaaaaaaaagacaaaaaaaaaaacnaccaaaaaaac

SEQ ID NO: 1794 - DNA, 355 bp, Homo sapiens
  misc_feature 31, 53, 218, 220, 244: n = A,T,C or G
tttttttcttttttttttttttttatgaatncatacttttattattatttganatggtgccttgctctgttgcccaggctcaagtgcagtggtgcgatctcagctcattgcaagctctgccccctgggttcacgccattctcctgcctcagcctcccgagtagctgggactacaggtgtctgccaccacgctcggctaattttttgtatccttagtananatggggtttcactgtgttagccanaatggtctcgatttcctgaactcgtgatctgcccgcgtcagcctcccaaagtgccgggattacaggcatgagccactgcactcggccactatttttaactttttaagaaac

SEQ ID NO: 1795 - DNA, 351 bp, Homo sapiens
acattagcaccataacatgcgtctttaaagccttcccaaatattagtaatcttgaccagcaatgacaagaaaaaagaggagcacctttacaagcagttgatatccaatattaaaataattgtggctttaaaaatatttctttaaattcttgcattacacttttctttttaaaccaatcttccaggagattaatcaatgaaatttataagttttatcaacgtataaaatttttttcatcttctgggactcatagaatacaatctgtgtttctgaccagttgaggtagttaaaatagggagggcttttctaatttcgtatttgactatttcagaaagaaaggttatcttttac

SEQ ID NO: 1796 - DNA, 190 bp, Homo sapiens
  misc_feature 147, 160: n = A,T,C or G
cgcaaggctccgtctcaataattaaaaaaaaaaaaaaaaaaaaaggccgggcacagtggctcaagcctgtaatcccagcactttggatggctgagacgggcagatcatctgaggtcaggagttcaagaccagcctggccaacatggngagaacctatctntactaaaaataaaaaaattagctgggcatg

SEQ ID NO: 1797 - DNA, 286 bp, Homo sapiens
cgctcgctccccgctctggagtctgccatcatggatgttctcgcagaagcaaatggcacctttgccttaaaccttttgaaaacgctgggtaaagacaactcgaagaatgtgtttttctcacccatgagcatgtcctgtgccctggccatggtctacatgggggcaaagggaaacaccgctgcacagatggcccagatactttctttcaataaaagtggcggtggtggagacatccaccagggcttccagtctcttctcaccgaagtgaacaaggctggcacgcagt

SEQ ID NO: 1798 - DNA, 544 bp, Homo sapiens
acatagttttgtgaatttcagctacattcagtccccacctgccctcctagaggagttgccttagtctgagcaaagtccattcaaccctatatgatggccctgggctttcctcaggcagaattgtaaaattaggaaacttctacttcggagctcatttgttcatacactcttcatcttttattcacaccccactagttatccactctcaacctcaacccttggcgtggggcatttcatcaagttacttattggtatttgcctttactccaaactgctaatcttttctaggtgcttagcatttcatgtttggcaactcacagtgggtagtaataagccttttcatcatatttaatctttcagtctgtgtaaactgtgcttctcctaaagcagaagtctaataggagttttgttcattaacttcctgatggcttctagaaatgtcatcaaagaaacatttcatatttatatccttttttgcttaaattttcttttgggtcaattcaaataatttattaatgtctatattaatataaaatagaaattg

SEQ ID NO: 1799 - DNA, 216 bp, Homo sapiens
gaaacagactgcctgaattgagaattttgatttcttaaagtgtgtttctttctaaattgctgttccttaatttgattaatttaattcatgtattatgattaaatctgaggcagatgagcttacaagtattgaaataattactaattaatcacaaatgtgaagttatgcatgatgtaaaaaatacaaacattctaattaaaggctttgcaacacata

SEQ ID NO: 1800 - DNA, 442 bp, Homo sapiens
  misc_feature 43, 121, 132, 138, 267, 293, 295, 308, 310, 335, 439: n = A,T,C or G
tacaagcttttttttttttttttttttttttttttttagtttngaacctttaataaaagtaaaaaatgaatgcaaaaagaacacaatgttgaaaacttagtatgaatgtgaacctcactanatgttcaaatntggtanagtgcaaattttgttcatactattttacatttttacaaactcaaatcactttggttcatatattttctataaactattggcaaaaaaatcctcaaatttacattcttttggctacattatttctaacanatatagatttacttccggtttcggananaaagacttattgngngtgcgtgatcaagtctgttttaaanattcactcgctgctttcatctaataacttctggtttttcataaaatgctgacatcttcattggaaatttttttcatgtaactgttttcattttcagaaaatatntaa

SEQ ID NO: 1801 - DNA, 379 bp, Homo sapiens
  misc_feature 373: n = A,T,C or G
agcctcgagcgatggcctatgtccccgcaccgggctaccagcccacctacaacccgacgctgccttactaccagcccatcccgggcgggctcaacgtgggaatgtctgtttacatccaaggagtggccagcgagcacatgaagcggttcttcgtgaactttgtggttgggcaggatccgggctcagacgtcgccttccacttcaatttgggtttgacggctgggacaaggtggtcttaaacacgttgcagggcgggaagtggggcagcgaggagaggaaggggagcatgcccttcaaaaagggtgccgcctttgagctggtcttcatagtcctggctgagcactgcaaggtggtggtaaatggaaatcccttntatgag

SEQ ID NO: 1802 - DNA, 415 bp, Homo sapiens
  misc_feature 291: n = A,T,C or G
acttagaatcactagttcaaacacaacaacagctgataaaatactgggaagcattcctacctgaagccaaagccattgcctagcaataagattgttgccgttaagaagaccttggatgttgttccagttatgctggattccacagtgaaatcatttaaaaccatctaaataaaccactatatattttatgaattacatgtggttttatatacacacacacacacacacacacacacacacactctgacattttattacaagctgcatgtcctgaccctctttgaattaagnggactgtggcatgacattctgcaatactttgctgaattgaacactattgcgtcttaaatacttgcactaaatagtgcactgcaagaccagaaaattttacaatattttttctttacaatatgtt

SEQ ID NO: 1803 - DNA, 227 bp, Homo sapiens
  misc_feature 166: n = A,T,C or G
cggccgaggtcctttagacgcaatatcttggcccagtgcggtggctcacacgtgtaatcccagcactttgagaggccaagacaggtggatggttgaggccaggagttcaagaccagcctgaccaacatggagaaacccatctctactaaaaatacaaaaaaattanccagatgtggtgatgcatgcctgtaatcccagctacttgagaggctgaaacacgagaatca

SEQ ID NO: 1804 - DNA, 356 bp, Homo sapiens
acagattgcctacttgaggaccttggccgctctgtaagcatctgactcatctcagaaatgtcaattcttaaacactgtggcaacaggacctagaatggctgacgcattaaggttttcttcttgtgtcctgttctattattgttttaagacctcagtaaccatttcagcctctttccagcaaacccttctccatagtatttcagtcatggaaggatcatttatgcaggtagtcattccaggagtttttggtcttttctgtctcaaggcattgtgtgttttgttccgggactggtttgggtgggacaaagttagaattgcctgaagatcacacattcaaactgttgtgtctgtggagt

SEQ ID NO: 1805 - DNA, 306 bp, Homo sapiens
  misc_feature 244, 277, 288: n = A,T,C or G
actgctcttatctgcacctttcattcaagctcccctcaagtgctccaaaagaacagagctttgggtattgcttcattaagaacacagtaactgcagtttaaaagccattgcattctttagggtcagtttattataacttatcctaccagaaagaatcacagtttaaggccatttatcatgtgcactatgtagtaaacaaaaccttgtccccagctccaccaagccactcccaagggtggactgngaatgtgacacttccagactcaccagagattanaaaaaacattnctattagggtcttaacct

SEQ ID NO: 1806 - DNA, 417 bp, Homo sapiens
  misc_feature 246, 247: n = A,T,C or G
ggaagaaataaaaagtgttctatttgtggatgatgtaattgtctcagtaggaaatctcaagggatttgcaacaaaaaaagtgagttcagcaaggttgcaggatacaaggtagacataaaaatcaatcgtatttctatgttttagccatgaaaacatgaacaccaaaactcaaaatacatcatttttaagcacacaaaaaataaaatgaaatacttaggggtgaatctaaaaacagcatgtgcaggnnatgtattctgaaaactacaaaactacttacagtggtgaaagaagtaaaagaaaatctaaataaatagagaggcatactatgcctactgtttggaatattcaaccttgtaaaatgtcacttattcacaaattgatataaatgtttaacacaattcatatcaaacttccagt

SEQ ID NO: 1807 - DNA, 318 bp, Homo sapiens
  misc_feature 295, 308: n = A,T,C or G
acaattataggattgtaatctaaactggaatttttaggcagtaagtcaccacaaaatgttttagataagacacaataaaattattataaataaaagcttaatgtttgtaaaaaatctcttttttagtatttcttttttcacatgaaagaagtggtggctgctaaaaaaaaagctacagtgtttattaagggtctttttgatttatgtaaatatttgtaaattggtcagtgcctgtaaatttaaatataaaaagtaaccttgaaaacagttttaactttttcaaaagaactatgtncaacattttttanacctgctgta

SEQ ID NO: 1808 - DNA, 279 bp, Homo sapiens
  misc_feature 17, 230, 246, 247: n = A,T,C or G
acagacgggatttcacntgtgttagccaggatggtctcgatctcctgacctcgtgatccgcccgcctcagcctcccaaagtgctgggattaaaggcgtgagccaccgcgcccagcctctctcctccagttttaagatacgagaacatccaaacattttcccccaagcttaaagaataaaaaggatgaagagaaagctgaagtaaggagaatcataattacaccaactatnctattttgagttatanntaacatttttttctgtgagcaaaggagcacag

SEQ ID NO: 1809 - DNA, 210 bp, Homo sapiens
aaaagactgcccctaccaccacaggaggaccagcctaaccatacgctccaaaagatggctgtgatagatcttgtgaagcaattactgagcagatcaagatctttgggaaggaacactaaagatgttttgaatgaattatagtccactggcattttagtgtattttttttctttttagaaacacacatttctaaaaatgtcatgttacatt

SEQ ID NO: 1810 - DNA, 167 bp, Homo sapiens
  misc_feature 111, 145: n = A,T,C or G
ggatgacaaccaaatcatcaccagctctggggataccacctgtgccctgtgggacattgagacaggccagcagacagtgggttttgctggacacagtggggatgtgatgtncctgtccctggcccccgatggccgcacgtttgtntcaggcgcctgtgatgcctgta

SEQ ID NO: 1811 - DNA, 185 bp, Homo sapiens
atccaggaactttttgatgctaattagaaggcctggactaaaaatgtccactatggggtgcactctacagtttttgaaatgctaggaggcagaaggggcagagagtaaaaaacatgacctggtagaaggaagagaggcaaaggaaactgggtggggaggatcaattacagaggaggcacctggga

SEQ ID NO: 1812 - DNA, 241 bp, Homo sapiens
actctgaggcttgtaggagggtaaaatagagacccagtaaaattgtaataagcagtgcttgaattatttggtttcggttgttttctattagactatggtgagctcaggtgattgatactcctgatgcgagtaatacggatgtgtttaggagtgggacttctaggggatttagcggggtgatgcctgttgggggccagtgccctcctaattggggggtaggggctaggctggagtggtaaaa

SEQ ID NO: 1813 - DNA, 173 bp, Homo sapiens
actaattttgcatttggccggatgctcttaaaaattaaaaagtagacatgtcacctagtaatatgcctattttaattttctaagaagttttgttaaaaattctattaaaatatacatatcctagttaccaatcacattcatacagagaaaatgaacattaaacatattactgt

SEQ ID NO: 1814 - DNA, 488 bp, Homo sapiens
  misc_feature 453, 471, 472: n = A,T,C or G
acatccagcagctctgtgaggacattatccaactgaagcccgatgtggtcatcactgaaaagggcatctcagatttagctcagcactaccttatgcgggccaatatcacagccatccgcagagtccggaagacagacaataatcgcattgctagagcctgtggggcccggatagtcagccgaccagaggaactgagagaagatgatgttggaacaggagcaggcctgttggaaatcaagaaaattggagatgaatactttactttcatcactgactgcaaagaccccaaggcctgcaccattctcctccggggggctagcaaagagattctctcggaagtagaacgcaacctccaggatgccatgcaagtgtgtcgcaacgttctcctggaccctcagctggtgccagggggtggggcctccgagatggctgtggcccatgccttgacagaanaatccaaggccatgactnntgtggaacaatggcca

SEQ ID NO: 1815 - DNA, 219 bp, Homo sapiens
  misc_feature 175: n = A,T,C or G
acaagctttttttttttttttttttttgaagggcttattaaactagttttactttagcaccattcttagtggagcaggattcttgatcatggggtggaattttgtgtatctgggcttcatgggatgcataaaattttccagttggtaagtagcaggtgccgagggtttggatcanaaaaaaaggcaggcagccgggttcccactcgccttccatgagct

SEQ ID NO: 1816 - DNA, 183 bp, Homo sapiens
gtgcagtggcgcaatgtcagttcactgcaacctctgcctcccaggttcaagcgattctcctgcctcagcctcccaagtagctgggatcgcaggcgcctgccaccacatccacacccagctaatttttgtatttttagtagagatggggtttcaccatgttgatcatgttgctctcgaactcct

SEQ ID NO: 1817 - DNA, 352 bp, Homo sapiens
  misc_feature 244, 247, 248, 323, 328, 337: n = A,T,C or G
ttttttttttttttgttttgtttttgacctagttttattaaatattgcttccttggggtgtgtttataacaactcccagaacatttcatgtaaggattcaaagcggtcatattaaaatacagcttcaatataaagtttatcacagttttacagtattcaaaaatgacagacctgccttaaaaaacaaaacaaaaaccaaaaaaggactattacacccaaaacataagaaaacaattaaataaanaannttggcattttcatgactttatagtataaaacagaatattaaatttattactggcaaacggacactgatttattanctttnaaatgtgtnccatttaaacacact

SEQ ID NO: 1818 - DNA, 462 bp, Homo sapiens
acctgtcacctaaatataacagtaaacatctccccgttgcttttggttgaagtaattttaaaacatataaatatgcatttcttttttttaaaaatgaggacatttctgtatacaggttgagcatcactaatccaaaaattcaaaatccagaatgctccgagatccaaaactttttgagccagtaacgtaacaccacaagtggaaaattccatacctgacctcatgtgatgagttgcagtcaaaatgcagtcaaaattgtgtttcatgcacaaagttatttaaaatattgtgtgaaattaccttcaggccaggtgttcaaagtgtgtatgagacataaatgaattttgtggttagacttgcatcccatccccaagatgtctcattattataggcaaaattccaaaatccaaaaaaatgtgaaagccaaaacacttctgatcttaatcattttggataaggggt

SEQ ID NO: 1819 - DNA, 475 bp, Homo sapiens
  misc_feature 460, 462: n = A,T,C or G
acaggcaggatcttgccaccttgcccaggctggtcttgaactcctgagctcatgccatctgcctgccttagtctcccaaaatgctgggattacaggagtgagccaccatgcccggctggcagttgcatggaagagaacacctctttatggcttaccctctagaatttctaatttatgtgttctgttgaaatttttgtttttttacctttattgaaacaacaaaaagtcagtattgaaacatatcttcctgttttctgttgtcaaatgatgataatgtgccatgatgttttatatatatcattcagaaaaagttttattttttaataacattctattaacattattttgcttgccgctggcatgcctgaggaatgtatttggctttgattacacactaagtttttgtaataaatttgactcattaaaaaccttttttttttaaaaaaaaaaaaagaaaatntnattagtgaactta

SEQ ID NO: 1820 - DNA, 214 bp, Homo sapiens
ctcagattgtgtagatatgctatttaaataatttatcaggaaatactgcctgtagagttagtatttctatttttatataatgtttgcacactgaattgaagaattgttggttttttcttttttttgttttgtttttttttttttttttttttgcttttgacctcccatttttactatttgccaatacctttttctaggaatgtgctttttttgt

SEQ ID NO: 1821 - DNA, 396 bp, Homo sapiens
  misc_feature 246, 385: n = A,T,C or G
ctgctatcatcattaacagcgtaattatacaagcatatttaatgctgagtttaatttaatatgtaatacatatggtaattgtagggtaatacccacaacaactgtagtttcttacttggccaagagaatgcttatttaagtgttagacttccattctggcaaaatcttgccttatcagaagacattggaaagagggattccctttggtgtttggtcttctacttagaaaaacctattgcagttagnttatcctgtagtattcatctttgtattctgaagataaggtttgaattaaattgatacacacagaggggaaccgattttttttatccaatgtgaattataaatgagataatccacagttattcattgtggagttgttganactatgaaaga

SEQ ID NO: 1822 - DNA, 415 bp, Homo sapiens
acccttcataaggaaaaatgaagtaatgcctataagtagcaggcctttgtgcctcagtgtgaagagaaatcaagagatgctaaaagctttacaatggaagtggcctcatggatgaatccggggtatgagcccaggagaacgtgctgcttttggtaacttatccctttttctcttaagaaagcaggtacaaggtggcctccctgtttttcgctgggaccgtttcaacaaaactctacatcagggcatgccagaggtctacaactttgattttattaccatgaaaccaattttgaaacttgatataaaatgaaggagggagatgacggactagaagactgtaaataagataccaaaggcactattttagctatgtttttcccatcagaattatgcaataaaatatattaatttgtca

SEQ ID NO: 1823 - DNA, 584 bp, Homo sapiens
  misc_feature 458: n = A,T,C or G
acaaaaagctacattggaggatagcagtggcagctccgagttacaagaaattatgagaagacgacaggaaaaaatcagtgctgccgctagtgattcaggagtggaatcttttgatgaaggaagcagtcactaatttgtttgtttgtatttaaactccattgtttttggcattattccaacatgctttgttttaagaagccttgaagggaatgtcagattcatttttcttgatgtaatttatcaccataaaaaaaaaacccatgcaaacctgagtgagcacaggatttgcttctaggcccattatttttattaaaactgaaaaaatttaaactgaattttttgaccttggaaaatatttttcttactttaccaaggtgaagtttccttaattagactaattattttatccccatcccagggtataaacaggaattgttttgataatggtggagttattnactgcaacaaagcaacaatgttgtccatgattcaaaatctaagcagtttcgattttgcctgtgaatatggtgtctgtcattcagggcatagctcactgtaggctagcctctgcttacttaagtctc

SEQ ID NO: 1824 - DNA, 389 bp, Homo sapiens
acagagtcttttgcttcctcccacccctagggggaaaaactgctttgtgctttgggaagttgtctctgaaacccggggacagaggacgcaggacagactaggagggagccgggaggatgggctgcagctgtggaggagggtttcagaggagagaggtcggagagcagaggcctgagaagccagaggcaggtggagagagggtggaaagtgagcagcgggctgggctggagccgcacacgctctcctcccatgttaaatagcacctttagaaaaattcacaagtccccatccacaaaaaaaaaaaaaaagaaagaaaaatatcaaggaataaaaatagactttgaacaaaaaggaacatttgctggcctgggggggcatctcaatttcta

SEQ ID NO: 1825 - DNA, 347 bp, Homo sapiens
  misc_feature 244, 245, 247, 335: n = A,T,C or G
accccagctctcttctaaaagagaagtgggtgggcacactgaactgtttggtggccccaaccacaggaagttgcaattctctggcttagggtgatacttttgccctccttgtgcccctctcagctttccatccccagctaggaagaaagaatggcactcttgggcttggcccagaattagagttattagagcaagagagagcttaggaagcatgagggcaactatagtgaggccttattgccannanggagggttttggttgctggcgcttgtgtataaaggggcaagagcagctcctttggactattcctgggaggactctgatgcagggcgtntgttgctcccct

SEQ ID NO: 1826 - DNA, 462 bp, Homo sapiens
  misc_feature 423: n = A,T,C or G
gagaagactacctagccagtgaagtgcagaggatagacataggaaaacattccaggcatttggagacagctgaaagtatccatgctgactttcatgatttagaagtctttaactgaattattaaaattgccttttttttgtgctgtacaatgtctactgtactgtgggtcatttagatgagatgaaaaacttaattaaatctgaagtgtcagaggcgcttagtaagccttagtaaagttgtgattgaagaaacttaatacaaatgaactagaggtttgtaatcatgccactcactaacgattttatttctgtagcagaatcattttttctatgtaaggtgttaatgtgtgtgtatgtgctttggttgtaggaaaacttgaaaattccaaaatccttattttcctatttgagaggctggttcancagggtgtgtgtgtgtgtgtgtgtgtgtgtgtatgaatg

SEQ ID NO: 1827 - DNA, 479 bp, Homo sapiens
  misc_feature 56, 138, 315: n = A,T,C or G
acaatttcctttagagaagtttcagaaccaagactaatttacatgaaaagctgtanagaaagtagttgaaaagtccattcataaaacttttattccacttacatgaatttaatacacgtgttcttaacaattatgctnggattgttcatgaaaatttcataagacattaaccaaagctagccatcatctcaagttatttccctgttaactatttttacagcacatgcatgttaggcaagtatcaaaaaaaaaaaaatcacaaaagcaaaaatcctaaaaaaaagttaaatacatgggtttttgttttactgctgngcttgatatacatgaagtaatgaataccaagcaattcatttttcctgcatctttacttttacatttgttcttaggttgcctaaaacatttaaatacaaataaaatgagtgtagcaaaataatgaaagctaacagcaggtaactttacaaataatggaatgtgaa

SEQ ID NO: 1828 - DNA, 382 bp, Homo sapiens
  misc_feature 354, 369: n = A,T,C or G
tttgcggactgcacttcagaaggagatcacaacgcgttatcaactggatccaaaatttatcacgagtattttgtatgagaataatgttatcactattgatctggttcaaaattcttctcaaaaaactcagaatgatgtggacatagctgatgtggcttattattttgaaaaagatgttaaaggtgaatccttgtttcattctaagaaaatggacctgacagtaaatggggaacaactggatctggatcctggtcaaactttaatttattatgttgatgaaaaagcacctgaattctcaatgcagggtctaaaagctggtgttattgctgttattgtggttgtggtgatagcagntgttgctggaattgntgtgctggttatt

SEQ ID NO: 1829 - DNA, 306 bp, Homo sapiens
acccagacttgtgcacttctttgttgtagtccccaaacttggcctgcacagcgtaggaccccaagagcacggcagtctcaggggggcagtagatctcatcgctaaggattccttccttcacttggaggaagaaaagtttctgggtgatgtcctggatgagctcctcagccacatcttcagggtagaacttggcccggaacttgaactggaggggattctccttcctgacctcctgggcagacaccttcttatccagcttcagccaggtaggaaatcctttattatccacatagtggaggccaaagt

SEQ ID NO: 1830 - DNA, 451 bp, Homo sapiens
gaggagccattgatgtgtgcttattgtgtaacagaacctggagcaggctctgatgtagctggtataaagaccaaagcagaaaagaaaggagatgagtatattattaatggtcagaagatgtggataaccaacggaggaaaagctaattggtattttttattggcacgttctgatccagatcctaaagctcctgctaataaagcctttactggattcattgtggaagcagataccccaggaattcagattgggagaaaggaattaaacatgggccagcgatgttcagatactagaggaattgtcttcgaagatgtgaaagtgcctaaagaaaatgttttaattggtgacggagctggtttcaaagttgcaatgggagcttttgataaaaccagacctgtagtagctgctggtgctgttggattagcacaaagagctttggatgaagctacca

SEQ ID NO: 1831 - DNA, 286 bp, Homo sapiens
actcaataaatatatgttggaaggatggatggaggtaatggatggaaagatggatggaaggatgaatggagggatggatgtgacccagctgaagtgtgagtaggaacattctcttattatgggtggaggaaagagagaggagattgagaaaataagataaaatacattgatgcgcatcatttttggtgttcgaaaagtaggattgaattaggactaataaatctagagaattttacctctttcaatgcccaagccacacttttctatcactttgaaaccgaaaaag

SEQ ID NO: 1832 - DNA, 223 bp, Homo sapiens
actgattgaagaaaaccacctctctgacaagcgctaatagcatctactacatttaatgtcatagattcttatttagcaagtgagctggattcgttgcaaacattcacaacttccattcagagaggctggcagatgtcagatggaagaaaaaccccggaggccagatctttactggtgctcacttctccatcagtctttctaaacactctaaataatagcttgt

SEQ ID NO: 1833 - DNA, 382 bp, Homo sapiens
  misc_feature 36, 123, 135, 155, 235, 242, 325, 346, 370: n = A,T,C or G
acaagctttttttttttttttttttttttttttttngacttgaaaacagtttatttaatttatacaaataactactaaatacaaaaagtagattaaaacaaaatagttatttttttctggcanagtttaaatgcncgtaatggataattctgaanaaaatgcattttccccgtagcgttcaggactaaaattctactgaaatctttgcttctaaatcagtaatatattcgggggngtcacgngggtaatggctaaatacgttctgcatatgaactgaaaaaaagttacagtctacacacatacaaatgtgaagcacttaaaatgngattttaactgataataaaanaaaatgtccattttaaagtatagngttaaaaacatt

SEQ ID NO: 1834 - DNA, 292 bp, Homo sapiens
  misc_feature 243: n = A,T,C or G
ggccaatagcatccttttccagtcttccggtctgacaaatggaataatagaagaaaaggacatacatgaagaattgccaaaacggaaagaaaggaagcaggaggagagggaggatgacaaagacagtgaccaggaaactgttgatgaagaagttgatgaaaacagctcaggcatgtttgctgcagaagagacaggggaggcactgtctgaggagactacagcaggtgaacagtctacaaggtnttttatcttggataaaatcattgaagaggatgatgcttatgacttcagt

SEQ ID NO: 1835 - DNA, 239 bp, Homo sapiens
  misc_feature 172, 219: n = A,T,C or G
acttgtcccactcctgttcagaggtcacatgcttatccaaaaactctgccatcccaatgcccattctccggcaaatgtcggcaatcactgtttggtatttctcagccagatttctaaactcaagggagatcgttgggaagtcctccagcacctggcgatccttctccttgcnctccatgaaccgccagtctggttggtaaaggaaagagtgaaagttgngtaacagcgggaccttcttt

SEQ ID NO: 1836 - DNA, 284 bp, Homo sapiens
  misc_feature 265: n = A,T,C or G
acagaccagtggttctcaaactttaaaatgcctcagcatcacttgggagcttattgaaatgcagatcccagagtcagtaaatctgcctgtgaagtatgatagtctgcatttgtaatgagcattcaagtgattctgatgcaggtgagctgggggcatacagggaggaacactgccctggactatccattgcatttttgcctctaaacaactacagaattttctagggttttaaattatgtaaaatgtttacttattctgagcttanagagaatggggagggtatt

SEQ ID NO: 1837 - DNA, 107 bp, Homo sapiens
ggccgcctccctaccggccctctgctgccagctccaagcccagccctcagccatggcatgccccctggatcaggccattggcctcctcgtggccatcttccacaagt

SEQ ID NO: 1838 - DNA, 335 bp, Homo sapiens
ttctcaaaggccctcagtgagataaattagatttggcatctcctgtcctgggccagggatctctctacaagagcccctgcccctctgttggaggcacagttttagaataaggaggaggagggagaagagaaaatgtaaaggagggagatctttcccaggccgcaccatttctgtcactcacatggacccaagataaaagaatggccaaaccctcacaacccctgatgtttgaagagttccaagttgaagggaaacaaagaagtgtttgatggtgccagagaggggctgctctccagaaagctaaaatttaatttcttttttcctctgagttctgt

SEQ ID NO: 1839 - DNA, 386 bp, Homo sapiens
acagagtcttttgcttcctcccacccctagggggaaaaactgctttgtgctttgggaagttgtctctgaaacccggggacagaggacgcaggacagactaggagggagccgggaggatgggctgcagctgtggaggagggtttcagaggagagaggtcggagagcagaggcctgagaagccagaggcaggtggagagagggtggaaagtgagcagcgggctgggctggagccgcacacgctctcctcccatgttaaatagcacctttagaaaaattcacaagtccccatccacaaaaaaaaaaaagaaagaaaaatatcaaggaataaaaatagactttgaacaaaaaggaacatttgctggcctgggggggcatctcaatttcta

SEQ ID NO: 1840 - DNA, 176 bp, Homo sapiens
tcggcggccgcccggcaggtacagattcttcatttagcattgatttacttcttagttttcatctttctgaccatccaccgtcttttaaacctcttggcattttgttttttttggattccccaagcattattcaaaaactggacagcagctcttttcactggtaacctcttgttggc

SEQ ID NO: 1841 - DNA, 472 bp, Homo sapiens
  misc_feature 242, 246, 247, 404, 455: n = A,T,C or G
attttgactagtgagcttaattgtccatttcttacaatttcaaagttacagtctcagaaatggttaattttaataactgtcctatcataaattaatgttggaataaattgaagttgttgataaatacttcatgaaaactaaagtctgaaataaattacttgttttatgtccaatagctactacatttgatagaacagttttgaggaacattttattcttgaacgcagcatctgacatggttntaannaagttggaatagtaaggattattggtttgtttcgatgagtggaagcggcatgtttgtagcatacaagttattcaataatcttgtgctgatgacctaaaaatatgtcttaactattcatcaaggaaagcctggtgaagcctttacttgttactacttnaacagttggaattagttgctctttttacttgatgaaacaaaactatacctntgaatatttatggatac

SEQ ID NO: 1842 - DNA, 327 bp, Homo sapiens
accaaatctttgggattcattggcaaataatttcagtgtggtgtattattaaatagaaaaaaaaattttgtttcctaggttgaaggtctaattgatacgtttgacttatgatgaccatttatgcactttcaaatgaatttgctttcaaaataaatgaagagcagctgtccttctttcctcttttaagtgttcagctgtggcatgctcagaggttcctgctggattccagctggagcggtgtgatacccttctttttcagctgttcgtgccttcctttcttgtatccaccaaagtggagacaaatacatgatctcaaagatacacagt

SEQ ID NO: 1843 - DNA, 310 bp, Homo sapiens
  misc_feature 242, 246: n = A,T,C or G
acagtgccaccttgtgccaccgcactgtggtagaatactgagcaaatgtggtatttttaccccttggattctctgcctctgaaagttatactttaatccacatgttgtgtgttgaccaaacaatctatttatgtgtcttagtagcaggtgactcaaatctcgtgataaagaagtcataaagagttaataaaatgctgggtatcttcagccaaccataaaatgctaggtatctctggccaacntaantcgatttagaggatttatttctttaggccttgcctcattctagaaatgatctgaagtattttag

SEQ ID NO: 1844 - DNA, 448 bp, Homo sapiens
  misc_feature 433: n = A,T,C or G
ggaccgcatcctagccgccgactcacacaaggcaggtgggtgaggaaatccagagttgccatggagaaaattccagtgtcagcattcttgctccttgtggccctctcctacactctggccagagataccacagtcaaacctggagccaaaaaggacacaaaggactctcgacccaaactgccccagaccctctccagaggttggggtgaccaactcatctggactcagacatatgaagaagctctatataaatccaagacaagcaacaaacccttgatgattattcatcacttggatgagtgcccacacagtcaagctttaaagaaagtgtttgctgaaaataaagaaatccagaaattggcagagcagtttgtcctcctcaacctggtttatgaaacaactgacaaacacctttctcctgatggccagtatntccccaggattatgt

SEQ ID NO: 1845 - DNA, 425 bp, Homo sapiens
  misc_feature 57, 98, 136, 144, 300, 346, 378: n = A,T,C or G
acaagctttttttttttttttttttttttttttttgggttgcaaagcctttaattanaatgtttgtattttttacatcatgcataacttcacatttgngattaattagtaattatttcaatacttgtaagctcatntgcctcanatttaatcataatacatgaattaaattaatcaaattaaggaacagcaatttagaaagaaacacactttaagaaatcaaaattctcaattcaggcagtctgtttctatcatttggtattctactcctttaaaaatttcatattgcccaacaaaaagnggttatttttactgtttttggagatgactgaacagatgaaggcatnagatgccttcatcagctggtattttgcctaanatctatttaagataaccttttcttatattttttacttaatattgggc

SEQ ID NO: 1846 - DNA, 327 bp, Homo sapiens
  misc_feature 27, 75, 287, 302, 324: n = A,T,C or G
tttttttttttttttttttttaaaganaaaaaatttttattgtgatataaaatgcacttataaaatgtccaccanaaggcatgtaattcttcactgctatataaatttactgggaatatgttattcaccatctaggtatgatactgccaactaaaacatactgtaaacgatgagttatactctataacaaatgcatcactgattttcagcaatcattggtttaataataattagtttaagactataatcacatctatattctggaatgtccatttactttaatgtantgtagtggaatttanagtataattgcacatagatggnacc

SEQ ID NO: 1847 - DNA, 558 bp, Homo sapiens
  misc_feature 14, 315, 486: n = A,T,C or G
acaatttcctttanagaagtttcagaaccaagactaatttacatgaaaagctgtagagaaagtagttgaaaagtccattcataaaacttttattccacttacatgaatttaatacacgtgttcttaacaattatgcttggattgttcatgaaaatttcataagacattaaacaaagctagccatcatctcaagttatttccctgttaactatttttacagcacatgcatgttaggcaagtatcaaaaaaaaaaaaatcacaaaagcaaaaatcctaaaaaaaagttaaatacatgggtttttgttttactgctgngcttgatatacatgaagtaatgaataccaagcaattcatttttcctgcatctttacttttacatttgttcttaggttgcctaaaacatttaaatacaaataaaatgagtgtagcaaaataatgaaagctaacagcaggtaactttacaaataatggaatgtgaaccgtttntgcccttatccagagtaaaatgggtcacaactttgtctaaaggaacacttctgcagctgtagtcaaaggtgt

SEQ ID NO: 1848 - DNA, 496 bp, Homo sapiens
cgcagagctgcggaagatgaatgccagaggacttggatctgagctaaaggacagtattccagttactgaactttcagcaagtggaccttttgaaagtcatgatcttcttcggaaaggtttttcttgtgtgaaaaatgaacttttgcctagtcatccccttgaattatcagaaaaaaatttccagctcaaccaagataaaatgaatttttccacactgagaaacattcagggtctatttgctccgctaaaattacagatggaattcaaggcagtgcagcaggttcagcgtcttccatttctttcaagctcaaatctttcactggatgttttgaggggtaatgatgagactattggatttgaggatattcttaatgatccatcacaaagcgaagtcatgggagagccacacttgatggtggaatataaacttggtttactgtaatagtgtgctgttcatggaaaccgagggctgcatcttgtttatagtcatctttgt

SEQ ID NO: 1849 - DNA, 168 bp, Homo sapiens
  misc_feature 42, 48, 108: n = A,T,C or G
acaagcttttttttttttttttttttttttttttttcgaaanaaaatngctttattatttttagttactacaaatatatattataatatttactaaggaaaaaatcanaactcataacaataagaacttaaaaaatacccacaatcttatataccaaaaggtaaatgc

SEQ ID NO: 1850 - DNA, 543 bp, Homo sapiens
acgctcctcctaattttgtttttttttctttaaatcaacaaatggtgtatataaaaatcccctaatcagacgattggagaaaaatcaaaactcccatgaaatgaaatgatgccaggtcacagctgagagtagctgcaaagagctgaaggccaacttggactaggcgttctcacctgaaggctctctaccacaggcacaggagtgactggggcaaggacagggcccattccctcataaaatgtatactctgccttatctgtgctaatgattgtccaggaagcgccatcatttatcatctctttatttggttcttttggacatggagtggcctgaaattgaattattctttcttgagaaaggcacaaatacattctttctgtatccttaaggtaaaatgcacatttatggagttgtgacacaggatcatctgcatccaataatgcggtctgcttatcaactttcctaattatctatatttaacaattaagaaataaaaggtcatccacacatggaaaggattttccttgtgtaaacatcaaaagt

SEQ ID NO: 1851 - DNA, 466 bp, Homo sapiens
  misc_feature 453, 454: n = A,T,C or G
caagaaggctgctggagctggcaaggtcaccaagtctgcccagaaagctcagaaggctaaatgaatattatccctaatacctgccaccccactcttaatcagtggtggaagaacggtctcagaactgtttgtttcaattggccatttaagtttagtagtaaaagactggttaatgataacaatgcatcgtaaaaccttcagaaggaaaggagaatgttttgtggaccactttggttttcttttttgcgtgtggcagttttaagttattagtttttaaaatcagttttttttaggtaaaactgacttttattacaattaaaaaagaacaaagacaatttgataagtgcctttaattacaacatacctgctatttacatgtaatcatacttttatatatagcttgaataagttttattacatgtaaactataagatattacaagttaaactccanncttttctggata

SEQ ID NO: 1852 - DNA, 367 bp, Homo sapiens
  misc_feature 244, 246: n = A,T,C or G
actatgaatagcttcttgctttatgactttaggattaacctgtaaaaaacatatcctgaactgagatatgcaaaatactcattttcaagttatggaaatgtgtttgtggcatataggactgtggggtctgtgtgtgtagtgagagtgtgtagccactattataactggaatttaatttacattcataaactactatatttcccatcttgcaaatcattttatgtctcatctgtttttcctttcngntatatctttggttttgaataccaacatttaaaatgatggtattttatcttttaaacttaaaaattatttaatacagctatatggaccttataaaattgatttcttatttattattagacat

SEQ ID NO: 1853 - DNA, 395 bp, Homo sapiens
actttgtctatgaaacttttgtatccgttgcttggatgaaggtcattaattgagggctggttgaagatgcatcagtattagtaaaatggctttaccctcaatttactacccaagacttaggtctaaccagtttcttccagtcaaagagtctgcaggcttcttgggtgtgagcatctatattgaggcggcatttattggtgaagcatccaccttggggactgccaggtagttcagcccctaaagattaggaggcatcacttactgagactgaataagaagaataatgttctgcttcctaaataatgcaaaaccctgtttgtaggaggagagtctccgtttgtgggatctttaaagtagattaagaactggaaaaaaaaaaaattccgcagcattgt

SEQ ID NO: 1854 - DNA, 546 bp, Homo sapiens
  misc_feature 517: n = A,T,C or G
agtggcactatcttggcttactgcagcctcgatctcccaggttcaagcgatcctcccatttcagccttccaagtagctgggactatacacatgccaccacacctgctgattttatttttaagtagagtagagcctgttgcccaggctcatctcaaactcctgagctcaagcaatcctcccacctcagcctcccaaagtgttgagattacaggcatgagccatcatgcccagcctattttatatatcttattaaaactattttcattttgaagatttgtggtagaatgaacaaaagttgtttatcagtagcacatggtaaagtttgagttcccgcttaaactaaattgttttaaaaggattatttctgtgttttactcttagtgtggccttttgattttgctttaccaaaactgtaagaaaacaaaacaaaagatcatactcataaaagatctgtcctgcagtgtttctttttaggtttttgaaaccacatagcctcttgattctcaattcttattgnttactctgtcagaatgtgaacatgaaggt

SEQ ID NO: 1855 - DNA, 463 bp, Homo sapiens
  misc_feature 400, 411, 414: n = A,T,C or G
accatacttgtcattgcgtagacttcttatcaaaatttcacatttatctgtaggaaaatgtaaagttggtaaaaattgtttacacaaatcacacattttccatccttgacaattgcagtgtttttttttaaatattgctgtattagacaattttaactgaagtaggttgtagaggctagaaacctgattaatagagcagtattagacaattctaactgaagtaggttgcagaggctagaagaaacctgattaatagagttagcttacaaagataaattttatgcagaaaagtattccaggtagataaaagagtagtgttattactctcaggtttacattaacagctgcccagatagctgaacaattatttcatataattcaaataatttaaatatgcagntttataacagncgntacataagcttgaagttaaagtgatcagagccaagggggaaaaacccac

SEQ ID NO: 1856 - DNA, 178 bp, Homo sapiens
  misc_feature 55: n = A,T,C or G
acaagctttttttttttttttttttttttttttgggttgcaaagcctttaattanaatgtttgtattttttacatcatgcataacttcacatttgtgattaattagtaattatttcaatacttgtaagctcatctgcctcagatttaatcataatacatgaattaaattaatcaaatt

SEQ ID NO: 1857 - DNA, 460 bp, Homo sapiens
accggtttttgtatataaaattcatgtttccaatctctctctccctgatcggtgacagtcactagcttatcttgaacagatatttaattttgctaacactcagctctgccctccccgatcccctggctccccagcacacattcctttgaaataaggtttcaatatacatctacatactatatatatatttggcaacttgtatttgtgtgtatatatatatatatatgtttatgtatatatgtgattctgataaaatagacattgctattctgttttttatatgtaaaaacaaaacaagaaaaaatagagaattctacatactaaatctctctccttttttaattttaatatttgttatcatttatttattggtgctactgtttatccgtaataattgtggggaaaagatattaacatcacgtctttgtctctagtgcagtttttcgagatattccgtagt

SEQ ID NO: 1858 - DNA, 92 bp, Homo sapiens
  misc_feature 76: n = A,T,C or G
acaagctttttttttttttttttttttttttttgacaactggtcatcaatttattaaaatagttgacttaagcatntgcaatggtgacttcc

SEQ ID NO: 1859 - DNA, 393 bp, Homo sapiens
accaaatgtcgaattctagactgaggagtagagttcattggagtcttaaactctctgatatcacttaaagctggagtttattttaaaacaaatgaagcatgggccacctcatgatgcagtggctcctctctggttgaggagagggaaaattggaaaaactggtcgagtaattatcaataattttttttaaaaagaggatcccaaactgtaaaagattgaaataatctttctcaggattttttaaatgtctaagattatgatgtcatatctcccacttaccttataagtaaaaaggttaatatcaagtaacttattagctcttaaagtaaaattgaacttattaaaagctatctatgatttaatagatttaataaaattccttcacgacctggt

SEQ ID NO: 1860 - DNA, 440 bp, Homo sapiens
  misc_feature 265, 393: n = A,T,C or G
acaagctttttttttttttttttttttttttgggaaactgaagaattcttttatttagtgggaaagaagtaggtaaatgacagacagctcatattctgttaaacagaaaaaaaaaagaatacaaacatcacagtgatgaattttcacaaagctaacagatttgaactacagagcaatggaatatttataagcaagatgtcatggtattaatgaccaaattgcatctaactgggttttctaagctcaaaaacatttaaaatctcanacttaaaatttaaatctagacatgacaattgtaagcataccactcagtcatttaaaactattcagtgagtgctactcttcctgcataaatatttttttcctaacattattttttctcccaagatttanaatgtcacatctcatgttcctactagtaatcacacatattataaaaa

SEQ ID NO: 1861 - DNA, 307 bp, Homo sapiens
  misc_feature 36, 197, 221, 231, 243: n = A,T,C or G
acaagcttttttttttttttttttttttttttttgnaataaaattgctttattatttttagttactacaaatatatattataatatttactaaggaaaaaatcagaactcataacaataagaacttaaaaaatacccacaatcttatataccaaaaggtaaatgctctatatttaaatacaggtgtttttcatgaanatggtatgcaataattcttatganagcattttgngatatgtaaagngcatgcagtccagtgtccaaggggtcatggttgtaaacagcgggtcgagggcgctgtccatggt

SEQ ID NO: 1862 - DNA, 464 bp, Homo sapiens
  misc_feature 81, 146, 156, 165, 259, 316, 322, 334, 361, 373, 393, 405,409, 422, 427: n = A,T,C or G
acaagcttttttttttttttttttttttttttttttttttttttaacgtaaacagttacttttattttgagtaaaaatacncattcatatcattttcccttatatccctcaaatcttaaatgtgttcaatatgtctagaagatatntggggtctanctagccganacattttaaaaagacagctgctcctgacttatatagcacttacatatttaaatttacaaagccaaagcaacattttaaaggggtttgactgacnatagcttgatgcatccacagattcatttgttcccgatctggcaatacaggaccatanaaaacnccaaacccagtntctcaataactgccagtccaaatgctnttccaataactntaatcaaattttttgccaanaagtcttttatnaaanaaatacaggtctntttgnaaacttgttttccattatagctttggcatggtctttg

SEQ ID NO: 1863 - DNA, 335 bp, Homo sapiens
actgctctgcactgcaacactacattgtcattctgcctgtctgttaccattcaattcagggttagtcttctagacttgcggtcaccaaaccaaataaaccagatgacctactacagaatgggaaaaaaatgctagaactttctggttccattagactttttccaatattcctttacgtttctatttttattacttgctaaaatattagtaagtggcccacatacaactacaaagacacacaaaaattgagatatgtgaaaaatgttattgatagggttcaaggataagtgttcatattcaattccaagggactgaaacacactaacaatctgaca

SEQ ID NO: 1864 - DNA, 569 bp, Homo sapiens
accatcctgggagcccacctccttgaaagattagactccaattttcaaaatcctaaggtttactagttccataatatacagtcaagcagagggctacttgggttgaaagtattgattcttgaaccttaacagcgttttaccttttagtcattgcacaaaacccttccaattttcactccacctgggtattctgcaaaatttcaagtaaaactcagattctgatattttcaagtttatcacctttagaataacaaatcctatcacttaaggagagccaaatcagagatgggtatatagttagcaatctaacagaatggcaacattttacatagcattctaaacggtccaatgaagcaaaacttaacatatgccaccttatatagaggaaattttagatctgagactattccagagtaaagcagcctcaggcacattcttaatgtgaaagtttgcaaggcacctccctctcccaagagacagtcagattgtaaattggtttttaggcaaacagactaaaagaataagcatccaaattcctaattcagtcatttcaaaatttagaagttaca

SEQ ID NO: 1865 - DNA, 364 bp, Homo sapiens
actttcaagccaatcttcctctgcagctcacctgacattaacgaaatgagtctctgtctggcctcatttgatgcccttggtgtgcgaattcgatcaatccactgatattctgggtcttcattgaccacaagttcttctacaaatccatgaattatcacagctctatagcattttggaatagacgttgtgcaaaagaatttgactccacatgatgactgcctaaatcgatttaaatcattgaagaggtctactttgacaactacattgatttccccacggataccatgtatggtgtcataaattggaaaccatcctgagatgactgttgcagcttcactatacagtaaaggatcaatatcaatgt

SEQ ID NO: 1866 - DNA, 510 bp, Homo sapiens
  misc_feature 437, 463, 493: n = A,T,C or G
acgatgtctagtgatgagtttgctaatacaatgccagtcaggccacctacggtgaaaagaaagatgaatcctagggctcagagcactgcagcagatcatttcatattgcttccgtggagtgtggcgagtcagctaaatactttgacgccggtggggatagcgatgattatggtagcggaggtgaaatatgctcgtgtgtctacgtctattcctactgtaaatatatggtgtgctcacacgataaaccctaggaagccaattgatatcatagctcagaccatacctatgtatccaaatggttctttttttccggagtagtaagttacaatatgggagattattccgaagcctggtaggataagaatataaacttcagggtgaccgaaaaatcagaataggtgttggtatagaatggggtctcctcctccggcggggtngaagaaggtggtgttgaggttgcggnctgttagtagtatagtgatgccagcagctnggactgggagagatagg

SEQ ID NO: 1867 - DNA, 240 bp, Homo sapiens
taattttttccctcttggggaacacatttagtatagtgtagaaaatacttccatgacattttcatataaggttatataacttttcatacataaacatgaaatttgttgtagaaaattctttaaaccaaacatttaaatctaggacttcaatttaatttgttccttgaatctatttttatgtggcccttaaaaaatatccaaaaaacccattgctaatatagcaataaaaatactttgggt

SEQ ID NO: 1868 - DNA, 211 bp, Homo sapiens
actctcttaaagtcacacaagatgctacaccggggtctgctcttgataaaataacagcaagtttatgtgatcttaaatcaaggcttgattcaagaactggtgtggcaccagatgtcttcgctgaaaacatgaagctcagagaggacacccatcatttggtcaactatattccccagggttcaatagattcactctttgaaggaacgtggta

SEQ ID NO: 1869 - DNA, 544 bp, Homo sapiens
  misc_feature 461, 478: n = A,T,C or G
ggagagaccgagtgaacctaccttcatttcaggagggattggccgcttggcacatgacaactttgccagcttttcctcccttgggttctgatattgccgcactaggggatataggagaggaaaagtaaggtgcagttcccccaacctcagacttaccaggaagcagatacatatgagtgtggaagccggagggtgtttatgtaagagcaccttcctcacttccatacagctctacgtggcaaattaacttgagttttatttattttatcctctggtttaattacataatttttttttactttaagtttcaggatacatgtgccgaatgtgcaggtttgttacataggtatatatatgccatgatggaaatatttatttttttaagcgtaattttgccaaataataaaaacagaaggaaattgagattagagggaggtgtttaaagagaggttatagagtanaagatttgatgctgganaggttaaggtgcaataagaatttagggagaaatgttgttcattattggagggtaaatgatgtggtg

SEQ ID NO: 1870 - DNA, 223 bp, Homo sapiens
acattgggtgagtgaactgaatattacaaccaaaacatagtattgatacaaattagactcctgtttacactgtaaggtaatgaatgagggaattctttaagtgttacagaaagatttagtagaaatgttaccagtggtatggctgaaagaatatttcggtgaagtgctgttatatcctgaaaaccaagagtgaaatgtagttcccatacaagtggagagttag

SEQ ID NO: 1871 - DNA, 137 bp, Homo sapiens
gatagttgtcaattggtctgaaacaaattcgctagggaatctatttgtgtagaactaattaatgtaaaaaaaacagaccatctcgtgttgtgtgcactgtgatataatggtagtatcagtgcaactttaatgattgt

SEQ ID NO: 1872 - DNA, 293 bp, Homo sapiens
gaagcagcctgtgtatattcctaacactttgttcactagcatttaagtttagaataagcccaagtaagacaatggaaatgtatatagaactcttagttcttacatgatttaattatatcgatacatgaatttaacttactttaatgtaggcaaactatcaattttttgtccattttcctgtttgttaaaataacatacctctcctacgtattattttcttgacccaaatgaaatattaacctaaggtcaagctgggagagagaaatgactgagatgaatgtctttactaaagt

SEQ ID NO: 1873 - DNA, 468 bp, Homo sapiens
acagtctgaaaccgtatgttttatccttatattttagagctttcagcagcctttttaagagaggccacttaccaaagttatttctataagctcaagagtgtttcggttggtaagttcttccagctgaagccactttttccttatagttaatacaaatgactatttttactttaaaaggtacagctgtcctggtgggaaatgaaacctgcagcagttcaggatgactaatgaaagcaattagcttgaacatttagaaaaaattcatatatgatctaaatttttatattatcatttctgtgccttctaattcctgcatcctgttcaaaacatctttccagacattaacttacacattgtataaaaccgaccaaaatgatttcctaaagttcatgcaaaaaaaaaaaaacaacctaattttctgttaatataaaagaaacttcagtttactgaccgtgaaacagactatgt

SEQ ID NO: 1874 - DNA, 416 bp, Homo sapiens
acacctctgctcattatggaattacacttaaaacgaatctcaagagggtgaccattgttgtttcagataccatccctaaggagagtggttaacaggaagattgccagtgttactgatggaaagaagtgtttgtttgtttttttttcttgtcaaagacttacaccatagttttaaattaaactgtcaggcattttctcagacaggttttccttttcaatgcagtaatgaagaactaagataaaaatcatgacttttgactgccactcaacattattacatgcaccaatattgcacacatctgttctgaactgttaaaatcatcttctgagtccttggggtgctgttttctccatcagaacacaaacacaacccatctaatcagtttccctcaaagatgaaattgacaaatttaatgt

SEQ ID NO: 1875 - DNA, 379 bp, Homo sapiens
actttttgtttttgttataaaggaagacagaacaaactggaatgttttatgatgttgtatagcaatcgctttttacctttcaaagttccgggtaaaaatgtgttatatctgtagttttttgtttttgtttttttttaaagcactacatctgttttcactaattgttaatttctgtttgaacccttcatttaattttctcatagatttaagtaaacagatgtattttgcacagtgcacttatgtctattttaacaatcctcctgcatctgtattttatagtcagccttttgaccacctggtgccagctatataaggaataaagttgattcatatcaacattagaactccagtcccaaactaatctgtcaggttcactggt

SEQ ID NO: 1876 - DNA, 204 bp, Homo sapiens
ttcggaatcacagtcccgccgtgtcttggaaactgctttggccgatgcaaacagccccctacccgtccccctcgcctcacacggtccctctccgaggccgagaagaccttctgttcctgtaaatacagccagcaagtgcaaactgtgattttattttccacgtattcctgaggacggactggaccgtctatgttttttcagccc

SEQ ID NO: 1877 - DNA, 147 bp, Homo sapiens
  misc_feature 143: n = A,T,C or G
actgcaaataaaaatccttatttgtttttgtagacttaaaaaaaaaaaaaaaaaaaaaaaaaaaaaaaaaaaaaaaaaaaaaaaaaaaaaaaaaaaaaaaaaaaaaaaaaaaaaaaaaaaaaaaaaaaaaaaaaaaaaaaaantttt

SEQ ID NO: 1878 - DNA, 347 bp, Homo sapiens
accattcttgagtgatcgcttaggtaagttttaattggtgacagtataatcttttgggaaataatgattacagttcagatgatgaatttaactgttcaactgctgaatgataacgggcatgaactaaaacttaattctgacagagctggatatggctgtataataaactggatcttaaatttatacttgggttttagttttaataactggaaatgtatcctttctaaatctttaattggtacaagcttttttttttttttttttttttttttttggcccatttgagtattttgttttcaattagggagatagttggtattaggattaggattgttgtgaagtatagt

SEQ ID NO: 1879 - DNA, 354 bp, Homo sapiens
acagctattatttgccatggaaaaggttagtctcatttagaaaaatcgaaagtgcacagcacttaaagggaatatatgaggttttttttttttttaaaaaaaaacttttatttattatttgtagtatattgtctgaaatgtgtcggcagttttttttcttttaatgtgtcaaatcttgaaatattaaatgtatacattttgtgctatgttttgggaacaaatctgtttgatttatatagttttatattgaattttttttgccctgattgtttagggtgataggtcttaagcagcatatatctatatatctgtatgtgggtatatagagatatatgtgtgtgtgtatgtatatgt

SEQ ID NO: 1880 - DNA, 519 bp, Homo sapiens
acattggttgggggccatggcgggttccacattcttatgattctaatagtcagggcggggcatgctgctgtggcttgaatagggattttgcatctggctgtctctggaggccgttatcctgaccttaggaaagacgctcccttctgctccaagattggtgaagcctgtcgaccgcagttttagattttgaaagtcttcgtcaatcaagttctcttcttcaatatgcttcgttttgttatttgatcttgctgtgacaatcaatgcaattatcatgctgagaatgacaatgccagcgatggtgcccacaatagtgaggatcagctgaaatttgtccttacagtcgagtccactgtagccaaatgcacacttttggcagttcccattagcatcttcctggtagccgggcacgcacgcacactcaggggccccaccactcttctttattaagcattgcttgtgctgtgcgttgcaggcatcaggacacttgagactggaagcaacgcagaaagggctctgtgg

SEQ ID NO: 1881 - DNA, 54 bp, Homo sapiens
  misc_feature 46: n = A,T,C or G
caagctttttttttttttttttttttttttggttttaaaaccagcnaattttat

SEQ ID NO: 1882 - DNA, 281 bp, Homo sapiens
acactttccaacaggcagaccctaccaggaactgggagacaagagcgggctctctcctgagataagacaagtttaacgtgaagaccttttggaaaattcccgggttttcctggctcttttcagttggtgtttctctgaggaatagggaggttctcatgaagatattttaaacttccatgctctgagaaatctgagaccacgtggtccttccctcgcagcagccacttagtagtaagcagtccctcaagtcctactggtccccgggcgtggattctcgatgt

SEQ ID NO: 1883 - DNA, 232 bp, Homo sapiens
ttcccctccctccctgccttcatggatcaccagctcacgtcatgttgccttctcttttctttgtgtgtgtgtttatttaagttatttttcttcctcctctcccttttctttttggccctccctccctccctcttctgccatgtaactggaggatgtgctatgagtttgcaaacagctggactgtcaggctgctttttttccagatgttcctcctctgcctccccttcccctc

SEQ ID NO: 1884 - DNA, 402 bp, Homo sapiens
  misc_feature 51, 301, 312, 376, 387: n = A,T,C or G
acattataacctgtatggtattttatttaaaggagataaacagccaaatancaaataggtcactgaatgataagatttgcaccttagaacaataatcattttaaggataacgagtaaatgtctgaaagcatgaggggctttatttgcctttacctcatatgagtctttgatcttgaaccgatacttttggatctcattgttgatatacctgaatttactttgtaagagattttaacttcacttcatgctgatgatgtatcaaattcattttatagaaagatttaaagtttttttctggaantgatatatgtnaaattacatttcctactgcagtatttgagcagggacagtcattttttaaatgtttttggccggncgtggtggctnatgcctgtaatctca

SEQ ID NO: 1885 - DNA, 270 bp, Homo sapiens
acttacgatttcattaaagaaaacagctttctgccatttcaaattgaccacatcaggcagatggcgtatcagatctgccagtcaataaattttttacatcataataaattaacccatacagatctgaagcctgaaaatattttgtttgtgaagtctgactatgtagtcaaatataattctaaaatgaaacgtgatgaacgcacactgaaaaacacagatatcaaagttgttgactttggaagtgcaacgtatgatgatgaacatcacagt

SEQ ID NO: 1886 - DNA, 440 bp, Homo sapiens
acagctgaaggagccggggagcagaaagtatatgtgtcaggtatgaggaagaaaatagattttggaagttatgagaaatgtagagagtgagttgagcatagtttgtgatttttagggcctctaacggtattaaagcagcggcagccgctgcacgcagacatgagggctaggctaaaacagtaaggtcaagttgtttggacagaaaggctacacggtgtggtcctggctcttgtgtaagaattctgaccgcactaaccatgcctaggaaggaaaggagttgttcttttgtaagggattgaggtttgggagattaatcggacatgatcagcaggaagagcacatgtgtttctatgagaattatgccgagataggtaacagatgaggatgaaatttgggcttgactgaagtaatgggggctgtccgcgaagccttgcggcagt

SEQ ID NO: 1887 - DNA, 68 bp, Homo sapiens
  misc_feature 31, 36, 49: n = A,T,C or G
ttttttttttttttttttttttttttttaangggcntgaattttattgnttttggagaggaatgaatt

SEQ ID NO: 1888 - DNA, 347 bp, Homo sapiens
accttattatcctacatcgcaaatttcaacagctacattatatttccttctgacacttggaaggtattgaaatttctagaaatgtatccttctcacaaagtagagaccaagagaaaaactcattgattgggtttctacttctttcaaggactcaggaaatttcactttgaactgaggccaagtgagctgttaagataacccacacttaaactaaaggctaagaatataggcttgatgggaaattgaaggtaggctgagtattgggaatccaaattgaattttgattctccttggcagtgaactactttgaagaagtggtcaatgggttgttgctgccatgggcatgt

SEQ ID NO: 1889 - DNA, 333 bp, Homo sapiens
acccacatgacacgtgatttggaaagagactagaggccacacttgataaatcatggggaacagatgtgttccacccaacaaatgtgataagtgatcatgcagccagagccagccttccttcaatcaaggtttccaggcagagcaaataccctagagattctctgtgatataggaaatttggatgaagggagctagaagaaatacagggattttttttttttttaagatggagtcttactctgttgctaggctggagtgcagtggtgcgatctcagctccctgcaacctccacctcctgggttcaaacaattctcctgcctcagcctcccgagt

SEQ ID NO: 1890 - DNA, 508 bp, Homo sapiens
tgaaaatcatctaccacccagagctatgtcaaggacctgagagccatctctttgaaatgaaaacattcaaagtgctacctctgcctcccagtccccggggagggaaggacccagctctggcttgcaccactgcctccggtcataaagataccagacatttgtccacttccggataggcaccaattaacaaacctggagagcgtagtcatattaagcaaccctctgttgggaaggaaaaaatcctttcctgctacccgtcttaggttcattggtgggaaccctgtaacttgttattctgacaaaagacagattcacacgagaaaagcatgccagtttatttaatgtaagttttacatgacacaggagccttttaaatatttatttatttatttatttatttatttaatttttgagacagtgtctcgctctgtcgcccaggctggagtgccgtggcataatctcggcacactgcaacctccacctgacatgggaacctttatgaaaatga

SEQ ID NO: 1891 - DNA, 572 bp, Homo sapiens
  misc_feature 558: n = A,T,C or G
actcggtgtctttagcttttcattctgctctgggtctgatcttttatcaccaacaagagtggaattttgctttggcatcacatggtagtaagacggggcatatttggaggagctacaacctcttttctttctagattcctgaatttcttcacagagctgctcaaagtcttcatcaagttcttctttaattatggcataggcagtatctcttaaagcacaggctctatgcctaataagacgatctccaggatctctatctggattgtattctaaggcattactacagattagatcaatatctctcaaatagtctttcacagtcagatacttgtgtagatcaattttactgattacagatgaaaggtccattggttgctttattacagtgacataatcaggaacctaaaattcaagcaaatgatcaaatcacaaaattaactctaaacataacatgtgagtcaagtttcgatgccaggcaatataggagatagagaataaatacgtaagagattatgataatatatttaacataaaacctttcacttgatttaaggctgnttttggtttgtatt

SEQ ID NO: 1892 - DNA, 407 bp, Homo sapiens
atcagggtttgctgaagatggcggtatataggctgagcaagaggtggtgaggttgatcggggtttatcgattacagaacaggctcctctagagggatatgaagcaccgccaggtcctttgagttttaagctgtggctcgtagtgttctggcgagcagttttgttgatttaactgttgaggtttagggctaagcatagtggggtatctaatcccagtttgggtcttagctattgtgtgttcagatatgttaaagccactttcgtagtctattttgtgtcaactggagttttttacaactcaggtgagttttagctttattggggagggggtgatctaaaacactctttacgccggcttctattgacttgggttaatcgtgtgaccgcggtggctggcacgaaattgac

SEQ ID NO: 1893 - DNA, 512 bp, Homo sapiens
acttcatttagatatcatacagttttcaaagtaattctaaaacattgagttgaatgtctgaatgatttatcagaactttagatgagttgggccacatttggttataataatacaatcaaagcattcctatttaaaagtaaatgaaacttggccgggtgcagtggctcacacctgtaatcccagcactttgggagactgaggcaggtggatcacctgaggtcaggagttcgagaccagcctgaccaatatggtgaaatcccgtctctactaaaaatacaaaaattagctgggcatggtggtgggcgcctgtagtcccagctacttgggaggctgaggcaggagaattgcttcaacttgggtggcggagtttggcagtaagccaagtggcgccactgcactctcaacctgggcgacagagtgagactctgtctcaaaaaaagtaaatgaaccttaagagacaatgaaaactataatcctgttttcaaaaattagtaatacaatctaatctgttc

SEQ ID NO: 1894 - DNA, 535 bp, Homo sapiens
gaaaagaggaagaacagagagaaattaagaaggaaattgagaggagaaaaactggaaaagaaatgttggattataaaagaaaacaagaagaagaattaacaaaaagaatgctggaggaaagaaacagagagaaagcagaagatagggcagctcgagaacgtataaaacagcagattgcattggaccgtgcagagagagctgctcgttttgcaaagacaaaggaagaagtagaggctgccaaagctgctgccttgctagcaaaacaggcagaaatggaagtcaagagggaatcttatgcaagagaaagaagcactgttgcaagaattcaattccgtcttcctgatggttcttcctttacaaatcagttcccttctgatgctcctctagaagaggcaagacagtttgctgcacagactgttggcaacacttacggtaatttttcgttagcaaccatgtttcccaggagggaatttaccaaagaagattataaaaagaagttactggatttggaacttgccccaagcgcttcggtggt

SEQ ID NO: 1895 - DNA, 452 bp, Homo sapiens
actgtaattctttcattgaggggctatgtgatggagacagactaactcattttgttatttgcattaaaattattttgggtctctgttcaaatgagtttggagaatgcttgacttgttggtctgtgtgaatgtgtatatatatatacctgaatacaggaacatcggagacctattcactcccacacactctgctatagtttgcgtgcttttgtggacacccctcatgaacaggctggcgctctaggacgctctgtgttcactgatgatgaagaaacctagaactccaagcctgtttgtaaacacactaaacacagtggcctagatagaaactgtatcgtagtttaaaatctgcctcgcgggatgttactaaactcgctaatagtttaaaggttacttacaatagagcaagttggacaattttgtggtgttggggaaatgttatggcaaggcct

SEQ ID NO: 1896 - DNA, 417 bp, Homo sapiens
ggaagaaataaaaagtgttctatttgtggatgatgtaattgtctcagtaggaaatctcaagggatttgcaacaaaaaaagtgagttcagcaaggttgcaggatacaaggtagacataaaaatcaatcgtatttctatgttttagccatgaaaacatgaacaccaaaactcaaaatacatcatttttaagcacacaaaaaataaaatgaaatacttaggggtgaatctaaaaacagcatgtgcaggccatgtattctgaaaactacaaaactacttacagtggtgaaggaagtaaaagaaaatctaaataaatagagaggcatactatgcctactgtttggaatattcaaccttgtaaaatgtcacttattcacaaattgatataaatgtttaacacaattcatatcaaacttccagt

SEQ ID NO: 1897 - DNA, 276 bp, Homo sapiens
acacacaaacgcacagggatgcacatggtttcctctgcctttgtgactaattttcttcttgatagttattaatagtatctaaataaaatattggggggatagaaaaataatgctgttagctcatacttccatgaaaatgtatatattataggctcaaaggaataatgactgctgtctgcagccagaaagaatctgaatttatgaattggaaagatatatatagtgtatttgtgaaagtttgcttaaattctgatacatgccttctttgtaggtgga

SEQ ID NO: 1898 - DNA, 359 bp, Homo sapiens
  misc_feature 23, 26, 33, 211, 303: n = A,T,C or G
accttgcatagggaaatagctgngtnccgtcanattctacagaaaagagtggaagcaagctttttaaaatgatgcccatgtgcaaagagataaattaccaggcacctgatttaccaccccaatttatcttgatcatataatcttttaacaaaaagaaaaatggcaatatctggtgacagtattaaaaagacaatgttgagattggcatcanaaaaactccaaaagtgcaccttataaaaaggacacctcactgtagaaacatctatgcacttagtaagccctactcatgcacaaacaagcagntgctgggaacttgtcgaagtttactttttcagaaagttgaagtatataaaaaaagt

SEQ ID NO: 1899 - DNA, 542 bp, Homo sapiens
acacagcaagacgttgagttacatgttcagaagatttatgtgatcagtttggctgaaccccgtctgcccctgcagctggatgatgctgttcggcctgaggcagaaggagaagaggaaggaagagctactgttaaccaggatacaagattagacaacagagtcattgatcttaggacatcaactagtcaggcagtcttccgtctccagtctggcatctgccatctcttccgagaaactttaattaacaaaggttttgtggaaatccaaactcctaaaattatttcagctgccagtgaaggaggagccaatgtttttactgtgtcatattttaaaaataatgcatacctggctcagtccccacagctatataagcaaatgtgcatttgtgctgattttgagaaggttttctctattggaccagtattcagagcggaagactctaatacccatagacatctaactgagtttgttggtttggacattgaaatggcttttaattaccattaccacgaagttatggaagaaattgctgacaccatggt

SEQ ID NO: 1900 - DNA, 474 bp, Homo sapiens
acttgtcttataggtaaccaacactgaaaactttgtagtgatgactaccaaagaaatacatagtaaaacaaccttttatttccaaattgttaaagagccagccattgatgctgctacatgagttccatgctcaagagccattgtaagagattaaggggtttctaggtttttggtgattttttgtttgtttttttctttgttttttagggtttttttttcttctttaattttttgattaaaacatacacacagctgttagcataaagtcgtggggggcattttctggaatgctcagcagttctgattaactgccaagcccaggttgcctctcatgaggcaactgaaaaaatcctgtgtcttgatagcatgggtgctgtgtgtgtgcatgtgtgtgtctgcattcatgccttaactcgggttactgcacaactttagttcttgacttagtctgcaccgtcatctagattgtattgt

SEQ ID NO: 1901 - DNA, 368 bp, Homo sapiens
ctaatcttcaactcctacatacttcccccattattcctagaaccaggcgacctgcgactccttgacgttgacaatcgagtagtactcccgattgaagcccccattcgtataataattacatcacaagacgtcttgcactcatgagctgtccccacattaggcttaaaaacagatgcaattcccggacgtctaaaccaaaccactttcaccgctacacgaccgggggtatactacggtcaatgctctgaaatctgtggagcaaaccacagtttcatgcccatcgtcctagaattaattcccctaaaaatctttgaaatagggcccgtatttaccctatagcaccccctctaccccctctagagaaaaaa

SEQ ID NO: 1902 - DNA, 600 bp, Homo sapiens
acagcagaggtggagtcagcacttgtggaatatgaggctgttgcagaggcagctgtggtgggccaccctcatcctgtgaagggtgaatgcctctactgctttgtcaccttgtgtgatggccacaccttcagccccaagctcaccgaggagctcaagaagcagattagagaaaagattggccccattgccacaccagactacatccagaatgcacctggcttgcctaaaacccgctcagggaaaatcatgaggcgagtgcttcggaagattgctcagaatgaccatgacctcggggacatgtctactgtggctgacccatctgtcatcagtcacctcttcagccaccgctgcctgaccatccagtgaacatgatcctgacctttacctaggattcctcctgctccaaactttgcccatcctctttgccccctcaggagtgctgagggccagtgttgacccacactaccctcccttgaccagctgtctgggaccggaaaccagctttgtctccaggtagagacaacatcctgtgactgccaggcagaaaggacagggcccaggtcagcctcagtctgctgtgcctccagactgcagagctct

SEQ ID NO: 1903 - DNA, 536 bp, Homo sapiens
  misc_feature 57, 79, 80, 97, 114, 119, 121, 153, 207, 227, 249, 285, 286,298, 309, 334, 373, 399, 412, 441: n = A,T,C or G
tccgtttcctgcttttggttcttacagtagtcggcgtaggccttagattttttactntctcctgaagaatttaacacanncatggatatcagaccanatcatacaatttatatnaacantntgaatgacaaaattaaaaaggaagaattgaanagatccctatatgccctgttttctcagtttggtcatgtggtggacattgtggcnttaaagaccatgaagatganggggcaggcctttgtcatattnaaggaactgggctcatccacaaatgccttgagacanntacaaggatttncattttatggnaaaccaatgcgaatacagtatgcanaaacagattcggatataatatcaaaaatgcgtggaactnttgctgacaaagaaaagaaaaaaganaagaaaaaagccnaaactgtggaacagactgcaacaaccacnaacaaaaagcctggccagggaactccaaattcagctaatacccaaggaaattcaacaccaaatcctcaggtccctgattaccctccaaactatat

SEQ ID NO: 1904 - DNA, 220 bp, Homo sapiens
ctccgtttcctgcttttggttcttacagtagtcggcgtaggccttagattttttactgtctcctgaagaatttaacacaaacatggatatcagaccaaatcatacaatttatatcaacaatatgaatgacaaaattaaaaaggaagaattgaagagatccctatatgccctgttttctcagtttggtcatgtggtggacattgtggctttaaagaccatg

SEQ ID NO: 1905 - DNA, 173 bp, Homo sapiens
gccacgaagaatgcagaagtcaaaccctcatgacaaagtaggcacaagtctacaataagctaaatcagaatttacaaatacaagtgtcccaggtagcattgactcccgtcattggagtgaaatggatcaaagtttgaattaaggcctatggtaaggtaacattgctttgttgt

SEQ ID NO: 1906 - DNA, 182 bp, Homo sapiens
acacaaagggatagtctcttttctggagctgatgtccctgcttggaggttagccccaaaacatggctcttgtattgttctaagagaaaaggctttcattttggttcttctgattggtgttacctactgcctaatatgtgttcattttttgacagagaggcagactattgaaaaagtctgtgt

SEQ ID NO: 1907 - DNA, 212 bp, Homo sapiens
actaagcagcagttttgcaaggatgggagactgggatagcttcccatcacagaactgtgttccatcaaaaagacactaagggatttccttctgggcctcagttctatttgtaagatggagaataatcctctctgtgaactccttgcaaagatgatatgaggctaagagaatatcaagtccccaggtctggaagaaaagtagaaaagagtagt

SEQ ID NO: 1908 - DNA, 381 bp, Homo sapiens
  misc_feature 157, 158, 243, 244: n = A,T,C or G
actatgaatagcttcttgctttatgactttaggattaacttgtaaaaaacatatcctgaactgagatatgcaaaatactcattttcaagttatggaaatgtgtttgtggcatataggactgtggggtctgtgtgtgtagtgagagtgtgtagccacnnttataactggaatttaatttacattcataaactactatatttcccatcttgcaaatcattttatgtctcatctgtttttcctttnngttatatctttggttttgaataccaacatttaaaatgatggtattttatcttttaaacttaaaaattatttaatacagctatatggaccttataaaattgatttcttatttattattagacattactactaaaaggt

SEQ ID NO: 1909 - DNA, 489 bp, Homo sapiens
acatgctgcctctggacaacctcaagatccgtgatgtggagaagggcttcatgtccaacaagcacgtcttcgccatcttcaacacggagcagagaaacgtctacaaggacctgcggcagatcgagctggcctgtgactcccaggaagacgtggacagctggaaggcctcgttcctccgagctggcgtctaccccgagaaggaccaggcagaaaacgaggatggggcccaggagaacaccttctccatggacccccaactggagcggcaggtggagaccattcgcaacctggtggactcatacgtggccatcatcaacaagtccatccgcgacctcatgccaaagaccatcatgcacctcatgatcaacaatacgaaggccttcatccaccacgagctgctgacctacctatactcctcggcagaccagagcagcctcatggaggagtcggccgaccaggcacagcggcgggacgacatgctgcgcatgt

SEQ ID NO: 1910 - DNA, 371 bp, Homo sapiens
acttccagggaccgcatggagatcccttaagttgaaactggacaaacagaacagtggatggttctagctgagatctgggatagtttctgaattcagaagtgttcaccagccacattgcatgtattagctggaaccatatatgaaactacgatactcagctgtttctaacctacaaacacagtgattacatatggctcaacttaatgtatatgaagcctagaatgtcagaactgatagagccttagagactttcaagtctatttcattatgttgaagaggaaaacggatgagggagagaagtgtccagcctaagatcacacatcaccttaagtggtagaatcagggctgcttctcttcctactggaccatgt

SEQ ID NO: 1911 - DNA, 533 bp, Homo sapiens
  misc_feature 120, 140, 294, 309, 311, 418, 430, 496: n = A,T,C or G
acaagcttttttttttttttttttttttttttttttagttttgaacctttaataaaagtaaaaaatgaatgcaaaaagaacacaatgttgaaaacttagtatgaatgtgaacctcactanatgttcaaatctggtagagngcaaattttgttcatactattttacatttttacaaactcaaatcactttggttcatatattttctataaactattggcaaaaaaatcctcaaatttacattcttttggctacattatttctaacagatatagatttacttccggtttcggaganaaagacttattgggngngcgtgatcaagtctgttttaaagattcactcgctgctttcatctaataacttctggtttttcataaaatgctgacatcttcattggaaatttttttcatgtaactgntttcattttcanaaaatatataagggggtcattccaaagttcaaaatgatcctattttttaaaaaacaaaattcctgnaaaacaaattaactccaggaacttaaaatttactcca

SEQ ID NO: 1912 - DNA, 491 bp, Homo sapiens
  misc_feature 488: n = A,T,C or G
actgtttagttgtgataattaaatatatataaaagctttctgagagattatttactatatgaatatattttcagctggctgatcaaaagtatttttaaaattttgtttttagccattcaaaatgtatttgtattttcagaattgaatgcaagtcatacttagagctcaattaaaatactcttgcaagaaaaagcattaaattctctttgagaattccgtgaaatgcaaattaagggaaaaataggttttaagcagtagcaaaaacacaccgctaaaaatggcctttgaattctcagagctatggaaaaatgtgagaaactaaattgtctcgagatgtcaagatttttctatctccagttgctattggcctgtcctactgttgtctttgaatatttcctgtattccaccccaaaagatttcaacttttagtttttctatcactgggcaaggtcagactgggtttataaaacaatatattggcatattgngat

SEQ ID NO: 1913 - DNA, 370 bp, Homo sapiens
  misc_feature 51, 340, 367, 368: n = A,T,C or G
acgtagaagatactgtcatcttttaggacaaagtattgtaaaattatctgntttagcccatgttctgatgacccacagctctgtcacctttgagcatcatctccccattctaagtttttttcccacttaattcctaaccctgcctctttgaggaagcccattgacggggcaattaaaaccttctcattgctcctgagaccagaacggcaagatgtttcctttcagaagctgagagccacaaggaggacagcagtgagcatctgcacagaaacgagctcagagacgcccatgttcagtggagcacgccgatggggtgggcgccctggctctagacgctctnctaacacacctgtgctttgatgacagnntg

SEQ ID NO: 1914 - DNA, 495 bp, Homo sapiens
acctactggtgctgaaaaaaggaaaattccggcttgaaggaaaggagtttagaactctgaaaatttggtgacattgtttttccctgaaagaaatgtgtgttggatttaacagatgaaattatctgccctccaaaagtcctttagaagagccagtgcaaggctgaagaccaaagcgtcaagaacacgccagactctcagcttcctctgctttgctcctttgttgaggaaatgcaaatgcaaagagcttcccgttaaaaacaaggagtgtctgagagccacgtgttcaacacgcttctcctgctgctgacccctctgcacctgcagaggcagtgagcacccaacaggtggcgccaaggcgcccgtcacacgctcacgtcctctggccagcagccacgtttattgaaggagtgtggcactgtcccatcattgtatatgccctcgtccatgaaggattccagtgtttcacgctgtcccagtatatacaaaaatgtacct

SEQ ID NO: 1915 - DNA, 186 bp, Homo sapiens
  misc_feature 58, 78, 88, 115, 119, 126, 150, 154, 164, 170, 175: n = A,T,C or G
acaagcttttttttttttttttttttttttttttttccacaaaaggaaattttatttnttgcctttaaacaaaataanatgctctcanagctttttttttttttttttttttttncccnggaaggnaagtttcattatgttgcccaggcnggtntaaaactccnggcctnaaatnatcctcccacc

SEQ ID NO: 1916 - DNA, 411 bp, Homo sapiens
acggccagggctattggttgaatgagtaggctgatggtttcgataataactagtatggggataaggggtgtaggtgtgccttgtggtaagaagtgggctagggcatttttaatcttagagcgaaagcctataatcactgcgcccgctcataaggggatggccatggctaggtttatagatagttgggtggttggtgtaaatgagtgaggcaggagtccgaggaggttagttgtggcaataaaaatgattaaggatactagtataagagatcaggttcgtcctttagtgttgtgtatggttatcatttgttttgaggttagtttgattagtcattgttgggtggtgattagtcggttgttgatgagatatttggaggtggggatcaatagagggggaaatagaatgatcagt

SEQ ID NO: 1917 - DNA, 221 bp, Homo sapiens
acggtagaactgctattattcatcctatgtgggtaattgaggagtatgctaagattttgcgtagctgggtttggtttaatccacctcaactgcctgctatgatggataagattgagagagtgaggagaaggcttacgtttagtgagggagagatttggtatatgattgagatgggggctagtttttgtcatgtgagaagaagcaggccggatgtcagaggg

SEQ ID NO: 1918 - DNA, 206 bp, Homo sapiens
actctaagattttatctaagttgccttttctgggtgggaaagtttaaccttagtgactaaggacatcacatatgaagaatgtttaagttggaggtggcaacgtgaattgcaaacagggcctgcttcagtgactgtgtgcctgtagtcccagctactcgggagtctgtgtgaggccaggggtgccagcgcaccagctagatgctctg

SEQ ID NO: 1919 - DNA, 393 bp, Homo sapiens; identical to SEQ ID NO: 1859

SEQ ID NO: 1920 - DNA, 405 bp, Homo sapiens
accagtccaataccatcctgcgtcacctgggccgcacccttgggctctatgggaaggaccagcaggaggcagccctggtggacatggtgaatgacggcgtggaggacctccgctgcaaatacatctccctcatctacaccaactatgaggcgggcaaggatgactatgtgaaggcactgcccgggcaactgaagccttttgagaccctgctgtcccagaaccagggaggcaagaccttcattgtgggagaccagatctccttcgctgactacaacctgctggacttgctgctgatccatgaggtcctagcccctggctgcctggatgcgttccccctgctctcagcatatgtggggcgcctcagtgcccggcccaagctcaaggccttcctggcctcccctgagt

SEQ ID NO: 1921 - DNA, 246 bp, Homo sapiens
ttaatgtttaaaactggaaaccagataatcacacaaaaatcacatttatttcaagagctcaaagtgcaaatacagcaagtcagttcacaaagtttcaagatacagtttttaatgacaatggaaatttgatatacaaaaatggaagggtaaatagaaataaagctcctcaatttttaaaaaaattcaagtaatttgaaaagcctttagactaaaatactccacttacatccattcagaaatgccagt

SEQ ID NO: 1922 - DNA, 566 bp, Homo sapiens
  misc_feature 540: n = A,T,C or G
ctcggcaatgatttctttcagttgtgaagttcctttcgtgttacaccctccactgaaccctcaaccttcgaaatactccagttttgtgggtttggtcatttttacttataaatttacctttttgtattttgcaatttacatgtgtttggtttgttttaaattctgtgaaagtggcttgattaaaagactccttttaaatggaagccaccagtcagcagaatggaagcttagaggaacttgcctgtgagcgctggtctttgtgtttggttttgtgatgtaacgatctttgctggggttttttgctttgttttgagggaaatgtcttggagtaaattttaagttcctggagttaatttgttttacaggaattttgttttttaaaaaaataggatcattctgaactttggaatgacccccttatatattttctgaaaatgaaaacagttacatgaaaaaaatttccaatgaagatgtcagcattttatgaaaaaccagaagttattagatgaaagcagcgagtgaatctttaaaacagacttnatcacgcacacacaataagtctttct

SEQ ID NO: 1923 - DNA, 416 bp, Homo sapiens
  misc_feature 126, 197, 245, 274, 286, 288, 359, 363, 393, 408: n = A,T,C or G
acaagctttttttttttttttttttttttttgactccatcaccccccaaggtttatttaaaagttatagaaaagcatagcctgggaggggcatccttgaactgaccagagttttggagggacccanagggacacactggcatggcccggggtggacggcaagaaacagaaagtgagagaggtatcctaagtcttctntacaagagccactggctgcccaggattgctgctggtccccggagcggnaaaaggcttaaaatcaggccaactccctntttccagttgcnanacgggcaggaggtggtgggggtgcaaagggaggaccaactcaggtgcagggattaagacttgacccaaaanacanaggcgtggggacagctgggtctgtagggcnacggttttatcgganaaagatcc

SEQ ID NO: 1924 - DNA, 526 bp, Homo sapiens
  misc_feature 50, 87, 226, 266, 350, 381, 420, 430, 455: n = A,T,C or G
tttttttttttttttttttttttttcagcttataacacaacttttattanaaaagttatacataacatagcatcaactattttcaanaacaatattaaacccgataagcaacaaaaaccagactaacaaaatgtgtaacaagaaactaatgacctttctaaaatcaaacattcaattatctacaatgtctttttacaaacggggaaaactccttggtttacaggcncatcatattgaatataaagctgcaatagcaattttatacnattaccactctgaaaaaactgaatcattaaaacagtaattacgagttcacaaatttaaaacatttcacataattttaaattatngggtatacactgaagtctgagtttcaaaagngattttttttccccacaaaagtttcaacacttaagctanaactttcagngttaactttgccctaaaaagttaanacatattctgataatcataacagtcacatgatttctgatgctatctggtctgttaataataaagtctttat

SEQ ID NO: 1925 - DNA, 598 bp, Homo sapiens
acagatttattatattttagtccaacccctatatttagcaaatacaaaaccacagtcatgtttacaatgtaaaaactgtagaatagctctgtatactaaaatattattaataatgcagtttttgagaaccaaaatatcagctggctgactttgcttttatgatgtatattaacatcttttagcatgacaataccactaagagaagttcaccattctttcagtatcttttgatttccagtatgcattactagttggcaaatttattttaatggcagtatggtaagaattcagtccaaagagcaaagattcattttgatgaactatttgatcatacaacatgcagcggcaaattttcaattcataaactatttttatcactcagtgaggattactattatagttggcataatcatgagaactttttcctgcttgattaaaagcatttaccattaccgttagattggctatgacatgcaagaggtccataaccccgccaaggatgtggcattcacctccccagcatgctcagttcgtatattaatggctgccttgattaagcttgaacatgaaacacaacacacttcagaacatgtgtctc

SEQ ID NO: 1926 - DNA, 504 bp, Homo sapiens
caataattacatcataagttctcaagcagaggcagtctattgcaaggaccttctttgctgccagttatcataggctgttttaagttagaaaactgaatagcaacactgaatactgtagaaatgcactttgctcagtaatacttgagttgttgcaatatttgattatccatttggttgttacagaaaaattcttaactgtaattgatggttgttgccgtaatagtatattgcctgtatttctacctctagtaatgggctttatgtgctagattttaatatccttgagcctgggcaagtgcacaagtctttttaaaagaaacatggtttacttgcacaaaactgatcagttttgagagatcgttaatgcccttgaagtggtttttgtgggtgtgaaacaaatggtgagaatttgaattggtccctcctattatagtattgaaattaagtctacttaatttatcaagtcatgttcatgccctgattttatatacttgtatctatcaa

SEQ ID NO: 1927 - DNA, 425 bp, Homo sapiens
  misc_feature 261, 280, 284, 391: n = A,T,C or G
tgggcttatgggatacagctggacaagaagattatgacagattacgccccctatcctatccgcaaacagatgtgttcttaatttgcttttcccttgtgagtcctgcatcatttgaaaatgtccgtgcaaagtggtatcctgaggtgcggcaccactgtcccaacactcccatcatcctagtgggaactaaacttgatcttagggatgataaagacacgatcgagaaactgaaggagaagaagctgactcccatcacctatncgcagggtctagccatggntaangagattggtgctgtaaaatacctggagtgctcggcgctcacacagcgaggcctcaagacagtgtttgacgaagcgatccgagcagtcctctgcccgcctcccgtgangaagaggaagagaaaatgcctgctgttgtaaatg

SEQ ID NO: 1928 - DNA, 200 bp, Homo sapiens
ttttttttaaaaagaaaaaaaactttatttcaaacaggttcagtgatatatgtgtgtgctacagcaaaggctggttgtggcaaagtttcatttcaaactgtatgatgtgggctgggcaaggtggctcacgcctgtaatcccagcactttgtgaggccgaggtgggctgatcaccctgaggtcaggagagaccggcctagc

SEQ ID NO: 1929 - DNA, 282 bp, Homo sapiens
actgaggaaatattttgtaaagtgagctttgggtataacttagccccatcattatttagagaatagaggaggaagaaagaggaaggattttaaaggcagacaatgacagaccattcaggataggtagggttttaaagggagataaacacagtctcatcaactaaggagagatttgctgcagtaaataggatgagggaaatagtctgtgggatgcaagcaaaggaagcagggtgccttagacactgagtggagccagaaagatcatgcggcctttttccaagt

SEQ ID NO: 1930 - DNA, 471 bp, Homo sapiens
actatcacttgttacatgccctctgaattgggagaaagtgggcttgcacactttgaggtaactaactgtaatttacttgtgttctctctttcttgctctccttctcaacatgaacacaaacctctatggaaaagtagcctcttgttaatctgatctagtttgtatggaaaaagcccatggagaaccttatctttaacaagctcccagagggtgcccagatttggaaattctagagagcagtggtgaccttttagcaaagcttctgtaacagttcgaatgagttgcagaacattccactccatcaaatgacactgtaaacaaatcacttcaagagaggcttggttttgtgtggcacagatggacccaagctttcatgctgtgcactgagatagaaactccacccgcagcgcctgcgatggatggagcagtgtgccctgatgctcaaagcgtattaaaggaaaaaaagtgatc

SEQ ID NO: 1931 - DNA, 351 bp, Homo sapiens
  misc_feature 79, 88, 89, 150, 264, 270, 278, 285, 287, 327, 344: n = A,T,C or G
caagctttttttttttttttttttttttttttttttttattttttaaatatttatttttcattcataaaaaataacatnttcactttnngataacataaatatgtttttaatgaaaaataactgtatttcccaaagcaaaaaaaaattanaagaatgacattattttacattttgtaaatctgtttaatgtctagcttaatagaatacagctagattcttttttctttttctatattcatcttttatgacacaatacagcatanagcatntggacagngccactntntactaatgagacaatgagactgaaaaaacaaataacttancatcattatgaaagtanatttgaa

SEQ ID NO: 1932 - DNA, 120 bp, Homo sapiens
acgcaacagaggcgatttcattcttatccatgtcgtcctccacaaacgggtttgggttggggaagttgtatctttccttccccattctcaagcactgctgggagaaattgtggttgatgt

SEQ ID NO: 1933 - DNA, 360 bp, Homo sapiens
acagatcattattttccagaaaaagtgacccatgaagttggctggggcgggtgtggagtgttatgtcacgggacggaccttgggatgagggcgttaatccatgggcccctctgagatcactttaaacattttggtaagactgcccaggctgatgaagggctggagcgtgtgttaaaaacaagggctagtgttggttaaaagggatctttggcaagtgggaaactgctcgccactgcagaatttcttcagaccaaggaagggactgaaacggacttggaaaactaaagcaaaaccatgactgccgggatggtctcgtgtggtgattctgcaagaaataatcaccagagcgaggggacaggt

SEQ ID NO: 1934 - DNA, 468 bp, Homo sapiens
acagaccagtggttctcaaactttaaaatgcctcagcatcacttgggagcttattgaaatgcagatcccagagtcagtaaatctgcctgcgaagtatgatagtctgcatttgtaatgagcattcaagtgattctgatgcaggtgagctgggggcatacagggaggaacactgccctggactatccattgcatttttgcctctaaacaactacagaattttctagggttttaaattatgtaaaatgtttacttattctgagcttagagagaatggggggggtatttttaaattttattgttttatttctttaagtttttctttgctttaagattataggtattaggtttgtttttgtttttccacttatcttgagttcactttgatgttaaatctattgctacttcagttgtaaaaccagccaaaagtttctggatgaaggtcaagtttgaccttttaggagttattgt

SEQ ID NO: 1935 - DNA, 161 bp, Homo sapiens
acaaacggttcttgctaaccaacaccaggtatatctgatgttcagatgagttccaataaaaataattttttttttttcaaaaggtgtctttttcttgagtgctggagggcttccaagcaagtccagacagctctgtgtggccccacactagtctagctctc

SEQ ID NO: 1936 - DNA, 526 bp, Homo sapiens
acggcattagaaacaacagagggctgtccttgatgactaaatccctaaacaacgtcagtgtccagaccatgaattacatattttttgaccatgcattacattattttttaataaatgttcaataaaattctttatagtggaaaattactcaatgaataaccactcaaatcatagttgcctaatataaattctaaacttagctaaaatgaaggcctcaaaaataatttatctacaataaacataccaaactgttactttaaaaaaaagagtttttagacattgctttggaaagaattcctgtattagtttatagaagatgagaggtcacttgacgaaatgggtgacagaactaagacaatggagaaggtaactggctgatctcttttttttacaccggatgtgacttgtcactggacatgctaatgccagtcgttactccttatgaagcagacacggacaggtctacagcattacataatagatgtgtcaataaactgtgtgtgtctgtgggtgcatacgtcctgcc

SEQ ID NO: 1937 - DNA, 358 bp, Homo sapiens
acttagggggtgtgccaggtgtctttcatggggccttccagacccactccccacccttctccccttcctttgcccggggacgccgaactctctcaatggtatcaacaggctccttcgccctctggctcctggtcatgttccattattggggagccccagcagaagaatggagaggaggaggaggctgagtttggggtattgaatcccccggctcccaccctgcagcatcaaggttgctatggactctcctgccgggcaactcttgcgtaatcatgactatctctaggattctggcaccacttccttccctggccccttaagcctagctgtgtatcggcacccccaccccactagagta

SEQ ID NO: 1938 - DNA, 502 bp, Homo sapiens
  misc_feature 452: n = A,T,C or G
actaaaaatagaaaaatataaatgaaatttcacagaaagcagcctccctcacagaaacacaggcaaggtgctgccgagcccaccatgcgatgccacgtgccacctgcctggccacgcttctccccattacaaacaaaaacacaagcttctctctacacccgtttcaaatacagcaccaagaacggagaccccttccacagcagcgaccctcctgaccaccactttgggtgctttccagccacataaatgacagacaaccccggtccccacggggttggctggctactggcccccgactctccatcgcttcagcgaatgtgggtgagaaaattaggcagtgaagcaataaagacctcacctttactccctcagatacacggagggatgaggtggacagacacgcaggcggccgtgccaacctgatccgagtgaaacagggctacactcgcaanatggtcctcccacggctgagcgcctcaggtgcacagaacaaactgaatga

SEQ ID NO: 1939 - DNA, 489 bp, Homo sapiens
  misc_feature 168, 194, 344, 415, 417, 464: n = A,T,C or G
ctttttttttttttttttttttttttttattagcatatatttattttataacttcacatttataacattttactttgtataccgccaataaatgacaatgaaactattttcataaatacaaaaacacatgaaattagggtgtcatggtaaccactgcatcactttggnggaacagtattaaaaatagaatttanaaagataaatgatcacaagtgataccttttaaaaaatgcttttcttacaatctcaggatattcttcagttaaactgaaccacaatcagaaaaaataagtaattatttaaaagtcaaacctctaacaattgtcaacaactgctggaagagncatcacaaatataaaaaacaacaagcactcaaatttacaataagagatgaaacggtttctaacaccagggnanactggaagtcaactggaagcatattagcttgttaccacacaactgtnagaacaataaagaaagcatgcattg

SEQ ID NO: 1940 - DNA, 424 bp, Homo sapiens
  misc_feature 395: n = A,T,C or G
acttgttggtctgtttaatgaagtttggttgatgccatcctttgcactgccgaagcgtaatcttgtgcattacttagctctctgctgatctcagtatggacagtgtaacaacaaaaccaaaatggctggacagacttcttgtgttttgtaaatataaactaggacagttctgtaggtttgttcagtgtgctagtggagtatttccttaatgtaaaacttcacttaacagagagattctttgtttagcaagcttggagtgatgataaaatggtaagaaataatataaatgttgaagaaagcatcacaacagaactataggagtctaaatttaataaatctttaaaaaaaaccagtgtctagaatatataccatgttttattatttaaaatcattgncttaaatttttgttcaaaaaataaaaatt

SEQ ID NO: 1941 - DNA, 114 bp, Homo sapiens
  misc_feature 102, 107: n = A,T,C or G
gtaaagaggccacctgggtggtggatgtgaagaatggcaaaggatcagtgcttcctaactcagataagaaggctgactgcacaatcacaatggctgactcanacttnctggctt

SEQ ID NO: 1942 - DNA, 89 bp, Homo sapiens
acctatagctctggatcctgctgctttttcccccaacacttaacagatgctcagtaaacatgttaaaccaagttgttaattagtattgc

SEQ ID NO: 1943 - DNA, 321 bp, Homo sapiens
acttatgtcaagtccagaatggggcagtgtccctctcctacctctctgcggagacgcaattgaaggtcaagtagactcagtgtagggcaggcagctgtcatgctgcaaagaagtttagaggagtctttgggttggggaggtgacaggtaggtaggacaggatctcttaagatgggaaagatactggggagaggagggctgcttggccccagggaactgcagtgaggtggaactgagctccgctcctgaatctccaaaggagcccatgctgcccggcttccctgagtcattttttccagcatcctgtcagatccctcaatgt

SEQ ID NO: 1944 - DNA, 490 bp, Homo sapiens
  misc_feature 472: n = A,T,C or G
actttgccccagacttcacacttcatccagatgtcagcacccgcatcgagaatcagaactcacgccagtatctggaccagatccgccagacaatctttgaaaacctgaagatgctgaaccatgcacctagtgtccagattcatgacgtgcctgcagacctcctgacctatgacaggactgatgaggctgatgcagaggagaggggtcctgaggagaactatagcaggccagaggcacccaatgagttctatgatggagaccatgacaatgacaaggaaagcgatgtggagatttaagagtggcttgggatgctgtgtcccaaggaatttcttttcacctcttggttgggctggagggaaaaggagtggctcctagagtcctgggggtcaccccagggcttttgctgactctgggaaagagtctggagaccacatttggttctcgaaccatctacctgcttttcctctctctnccaaggcctgacaatggt

SEQ ID NO: 1945 - DNA, 485 bp, Homo sapiens
accttcatataatatcttctttttaatttcttctctggcaattctttcctggattctttgctttgcataattatacctacaatgaaaccttagaagaaaagaatatgaataaattgttaatataaagtcctacagaaattaatttatgaaatttctctaaatcacacaaaacttaaatacagatgactactaccctgagactgaaaaatatgttctaatttatagtgctatttttgggcagttttggtgtcagaatacctatcaacacattctttttttattaggaaaaaaaggatgtctacataacaatttgtaaagtgataaaatccattagtttttaagtcttctgatagcattggctattataagaaacaagtatttgctctcgtttttaacgggataataatgctatgtctacataaaatgatttctaccaccttaaatagctcactgtagaaattcatgtataaatggaaccatatagt

SEQ ID NO: 1946 - DNA, 57 bp, Homo sapiens
actactctagggagtatgctggaggcagagggcaagggaggggtggtattaaacaag

SEQ ID NO: 1947 - DNA, 164 bp, Homo sapiens
  misc_feature 156: n = A,T,C or G
acgtcagagccccctcctgccagccggatgggggcctggatccagtgggaaatcacatgggaatatggctggcaaactgcaaagggccagatgagtgtcaggttacagaataaatctttactaactcaaagaagaaaagggctgcggataaaacangaaaggtt

SEQ ID NO: 1948 - DNA, 226 bp, Homo sapiens
  misc_feature 202, 220, 221: n = A,T,C or G
accccgagattcagcccgggcagcaggtccagggatggcctgtgcaacactcagatacctgggagagaagccgatccctgctgggacagctcggctggtggccagaaaagtctggggcctgattcctctgctctgctccctggagagggggtcggggcagctgcttcaccctctgacgagaagcctacctcctactgttcangattgggtgttggcccanngaggt

SEQ ID NO: 1949 - DNA, 218 bp, Homo sapiens
  misc_feature 177, 181: n = A,T,C or G
acattttggtcagcagttcaatcacatgctcgctgaccagcaggaagtcccccttggagcccaccgatgacatcttaggaagagggaaaaatggcaggaaagggattcattttttctcttcaggagcacctgagggacatcaaaggcccagagcgaaaggtctggtccccatcaccnccancctgccccagccctgggatgcataccaccttctccag

SEQ ID NO: 1950 - DNA, 495 bp, Homo sapiens
  misc_feature 454: n = A,T,C or G
actcatgcccgactgtctaccaggcacacagactttgaggagagggcgtatgtcgtcttgatccgcatcaatgatgggggtcggccacccttggaaggcattgtttctttaccagttacattctgcagctgtgtggaaggaagttgtttccggccagcaggtcaccagactgggatacccactgtgggcatggcagttggtatactgctgaccacccctctggtgattggtataattttagcagttgtgtttatccgcataaagaaggataaaggcaaagataatgttgaaagtgctcaagcatctgaagtcaaacctctgagaagctgaatttgaaaaggaatgtttgaatttatatagcaagtgctatttcagcaacaaccatctcatcctattacttttcatctaacgtgcattataattttttaaacagatattccctcttgtcctttanatttgctaaatatttcttttttgaggtggagtcttgctctg

SEQ ID NO: 1951 - DNA, 338 bp, Homo sapiens
  misc_feature 172: n = A,T,C or G
acccggccaacatcaagtgactttatagctgcaagaaatgtggtatgtggagaagttctgtatgtgaggaaggaaaaaaagaaaataaaagtgtgtttgaaaaatattatcttgggttctttgtaaaatttattttttacatgctgaattagcctcgatctttttgattaanagcacaaacttttttttgtaaaacatgtaaaaaaaaaactgggattaatttttagtgttggaactgcctcttattttaggctgtagataaaatagcatttttaggttagccagtgtgactatgcacctaattttttatgagattaaattcataagacttaatttgt

SEQ ID NO: 1952 - DNA, 312 bp, Homo sapiens
  misc_feature 44, 50, 78, 110, 126, 148, 174, 179, 189, 202, 219, 236,248, 275, 295, 301: n = A,T,C or G
acaagcttttttttttttttttttttttttttttttcttgaaanaaaatngctttattatttttagttactacaaatntatattataatatttactaaggaaaaaatcanaactcataacaataanaacttaaaaaatacccacaatnttatataccaaaaggtaaatgctttntattnaaatacaggngtttttcatgaanatggtatgcaataattnttatgaaagcattttgngatatgtaaagngcatgcagtccagtgtccaaggggtcntggttgtaaacagcgggtcnagggcnctgtccatggt

SEQ ID NO: 1953 - DNA, 447 bp, Homo sapiens
  misc_feature 390, 415, 416, 426: n = A,T,C or G
gtttgacagcacttggaaggtagaccggagtgaaaactatgacaagttcatggaaaaaatgggtgttaatatagtgaaaaggaagcttgcagctcatgacaatttgaagctgacaattacacaagaaggaaataaattcacagtcaaagaatcaagcacttttcgaaacattgaagttgtttttgaacttggtgtcacctttaattacaatctagcagacggaactgaactcagggggacctggagccttgagggaaataaacttattggaaaattcaaacggacagacaatggaaacgaactgaatactgtccgagaaattataggtgatgaactagtccagacttatgtatatgaaggagtagaagccaaaaggatctttaaaaaggnttgagcattattcttggcgcacagnncaaaatacanattggacagaagatctatatt

SEQ ID NO: 1954 - DNA, 215 bp, Homo sapiens
  misc_feature 156, 168, 175, 176, 191: n = A,T,C or G
gttaaaatggggataataatactgacctacctcaaagggcagttttgaggcatgactaatgctttttagaaagcattttgggatccttcagcacaggaattctcaagacctgagtattttttataataggaatgtccaccatgaacttgatacgtncgtgtgtcccanatgctgnnattagtctatatggntctccaagaaactgaatgaatcca

SEQ ID NO: 1955 - DNA, 495 bp, Homo sapiens
  misc_feature 465: n = A,T,C or G
gagcggccgcccggcaggtacacttgatggggtccttgaggtcctcaccagccacagtgacccaggacacagctatgacctcaggcatctgccaatttcacccccaaaaagaaaaaattaaaaaaaaacaaccataaataaatagtgtttctggaaatgaaaaaaaatttatttttgtgtttaaacatcattcccctactcttgaaaacatggaccatccctgtatttccccctcccccaaaaccttcccactttgagacaaattaatgacaaaaggatggttctgctgtggtttgctttttcaatcctgggtctagtgttttctgaactggtgtgagacaggctaaagatcaacgccacacacacaccccgtccttcatgagatgagggtttgttcagttcaatctcacatttaaatttcacttgtcatcggaacaaatttggagatctttaacgagataattntaaaacagaatcaaaagggatagcgcacct

SEQ ID NO: 1956 - DNA, 439 bp, Homo sapiens
acaaaccaaaatcagagtttaaggataaataggaggtttacatatttgtagggtccttattcctcctaaatgttactctaaggaattattcttcttaatttgttacatataagtcaactattgtcaaaaacctcccttgaggtgactcttacggtatgtgaaatgtgtattaaaaaaaaaaaagttttggccgggcgcagtggctcacgcctgtagtcccagcactttgggaggccgaggtgggtggatcacgaggtcgggagattgagaccattctggctagcacggtgaaaccccatctctgctaaaaaaaaaaaaaaatacaaaaacaattagccaagcatggtggcaggcgcctgtggtcccggctgctcgggaggctgaggcaggagaatggcatgaacccgggaggaggagcttgcagtgggctgaggtggta

SEQ ID NO: 1957 - DNA, 118 bp, Homo sapiens
  misc_feature 36, 63: n = A,T,C or G
tgtacaagcttttttttttttttttttttttttttngaaaaaagaaattttttttttaattanaaaccaagtttacatacggttaaatggttactaaaagctcagttgtaaccactcc

SEQ ID NO: 1958 - DNA, 230 bp, Homo sapiens
tttttgttggtgagtagtctcatgccttgagatctgtggtggtcttcaaaatggtggccagccagatcaaggatgtagtatctcatagttcccaggtgatatttttcttattagaaaaatattataactcatttgttgtttgacacttatagattgaaatttcctaatttattctaaattttaagtggttctttggttccagtgctttatgttgttgttgtttttggatg

SEQ ID NO: 1959 - DNA, 253 bp, Homo sapiens
ttttaattttttatttatttatttatttttagcaagaatgtacaattctttttgcaattttttgctaacaaaagacaaaaagaaatagtgctcccttcaatttagtagcaataaaatcatctatcttcatctctctcagagggcttagggagagtgaaaggaattagaggaacataaaccatgggtccttcaggtaaaataagtcatttcatagtgatggaggcaacagcaggctacgctcttgtctgcctgt

SEQ ID NO: 1960 - DNA, 367 bp, Homo sapiens
acagaatatttaatgagtctgtcttgccccaaaagggaaaaacacaagtagctaagccatttgcagagaggaaaaatgtcatggaaaaatgaaaaatctctctaatgtctatagcacatgaaatatctaagtaggtgggtgcagtggttcatgcctgtattgggagaccaaggcaggcagatcacttgacgtcaggagttcaagaccagcctggccaaatggcgaaaccccgtctctattaaaaatacaaaaattagctgggcatggtggtgggtgcctgtaaacccagctacttaggaagctgaggcaggagaatcatgtgaacccaggaggcggaggttgcagtgagctgggatcacaccactgt

SEQ ID NO: 1961 - DNA, 215 bp, Homo sapiens
accagctactgaatacaccggatctagatatgcccagttctacaaatcagacagcagcaatggacactcttaatgtttctatgtcagctgccatggcaggccttaacacacacacctctgctgttccgcagactgcagtgaaacaattccagggcatgcccccttgcacatacacaatgccaagtcagtttcttccacaacaggccacttacttt

SEQ ID NO: 1962 - DNA, 511 bp, Homo sapiens
  misc_feature 352: n = A,T,C or G
acatgagcattcagcctgctgaaaatccagatgattatgatgatggcttttcaatgaagcatacagccaccgcccgtttccagagaaaccaccgcctcatcagtgaaattcttagtgagagtgtggtgccagacgttcggtcagttgtcacaacagctagaatgcaggtcctcaaacggcaggtccagtccttaatggttcatcagcgaaaactagaagctgaacttcttcaaatagaggaacgacaccaggagaagaagaggaaattcctggaaagcacagattcatttaacaatgaacttaaaaggttgtgcggtctgaaagtagaagtggatatggagaaaattgcagntgagattgcacaggcagaggaacaggcccgcaaaaggcaggaggaaagggagaaggaggccgcagagcaagctgagcgcagtcagagcagcatcgttcctgaggaagaacaagcagctaacaaaggcgaggagaagaaagacgacgagaacattccgat

SEQ ID NO: 1963 - DNA, 323 bp, Homo sapiens
  misc_feature 269: n = A,T,C or G
acctctgctatttgctgttattttatctgctatgctattgaagttttggcaattgactatagtgtgagccaggaatcactggctgttaatctttcaaagtgtcttgaattgtaggtgactattatatttccaagaaatattccttaagatattaactgagaaggctgtggatttaatgtggaaatgatgtttcataagaattctgttgatggaaatacactgttatcttcacttttataagaaataggaaatattttaatgtttcttgnggaatatgttagagaatttccttactcttgattgtgggatactatttaattatt

SEQ ID NO: 1964 - DNA, 161 bp, Homo sapiens
ttcatatatttaagaatgttttccactttgggaggccaaggcaggcagatcacttgagttcaggagctggagaccagcctggccaacatagtaaaacctcatctctgctaaaaaatacaaaaaataggccggatgtggtggcatgcacctgtaatcccagc

SEQ ID NO: 1965 - DNA, 398 bp, Homo sapiens
actgctccactcgctgctcaaaaaggcctgggtaaaagaaacaggcacagggaagagaacagtcattggaggaagggaaggagaggcctacatgaagggaaccatggagcacagatgccaaaaaaggagaaagaaaacatctgggatgataatttgcaggagcatcttactagaattcgggctggctcatcaaggcgatcattagtgacatcttgccggggtttgctgctgccaccctgcctccccatgcacattcccaagctgcactaggtgaggaggctgcttctcagttcagagctgccccaagtggacatctctagcttccttcagacaactctaccatgttgttccaaaaaggttgttatactaaatggatagtattagaggacagaagaagt

SEQ ID NO: 1966 - DNA, 470 bp, Homo sapiens
  misc_feature 463: n = A,T,C or G
cggctgtgcagacattcaattgttattattatgtcctacaagcattaattaattaacacactttagtaagtatgttcgcctgtaatattgaacgtaggtgcgataaataataggatgaggcaggaatcaaagacagatactgcggcatagggtgctccggctccagcgtctcgcaatgctatcgcgtgcataccccccagacgaaaataccaaatgcatggagagctcccgtgagtggttaatagggtgatagacctgtgatccatcgtgatgtcttatttaaggggaacgtgtgggctatttaggctttatggccctgaagtaggaaccagatgtcggatacagttcactttagctacccccaagtgttatgggcccggagcgaggagagtagcactcttgtgcgggatattgatttcacggaggatggtggtcaagggacccctatctgaggggggtcatncatgggg

SEQ ID NO: 1967 - DNA, 443 bp, Homo sapiens
gagagcactgctttctcatggcctgtgtgtgacatgtgtggcaacgggagattggaacagaggccggaagacagaggcgccttttcctgtggggactgctcccgggtggtcacatctcctgttctcaagaggcacctgcaggtcttcctggactgccgctcaagaccgcagtgcagagtgaaggtcaagctgttgcagcgcagcatttcctccctgctgaggtttgccgccggtgaagatgggagctacgaagtgaagagtgtcctcggaaaggaagtggggttgttaaattgttttgtccagtccgtaaccgcccacccgaccagctgcattggattggaggaaatcgagcttctgagtgcaggaggggcctctgcagaacactagcggttgccgcaggatctgtgaactttgcaatgtggctgcaagggtggtggtggtgg

SEQ ID NO: 1968 - DNA, 393 bp, Homo sapiens
accccaggaccatcttcaggaccccaggtctatctttaggaccatgcttagaggtgggcttggtggctcaaatgctatgcgcgttgtaaactttgatagaaattgataaatgtccttctaaaaagattacaactaatttacatttccggcaagaatgaggagggttttgagccaaggagggcacaggtggctctgcatcttaggtcattcagtcattcatggaacaaatccgtatgaggatcttccttgcttactgcatgtgtgccaggtctcaactctgggatatatcagatagcacagcaaagtccccacctcctggagctggcattttaatgagagcaacacaccacaagcaataagcgaatatatgtgatatgtcagatggtgacaggt

SEQ ID NO: 1969 - DNA, 532 bp, Homo sapiens
caagaattggatttggggaagagcatgactaatatgttctgcacaagacatgaaggcacagacagcactgtctttcttcctcattctcataacatctctgagtggatctcaaggcatattccctttggctttcttcatttatgttcctatgaatgaacaaatcgtcattggaagacttgatgaagatataattctcccttcttcatttgagaggggatccgaagtcgtaatacactggaagtatcaagatagctataaggttcacagttactacaaaggcagtgaccatttggaaagccaagatcccagatatgcaaacaggacatcccttttctataatgagattcaaaatgggaatgcgtcgctatttttcagaagagtaagccttctggacgaaggaatttacacctgctatgtaggaacagcaattcaagtgattacaaacaaagtggtgctaaaggtgggagtttttctcacacccgtgatgaagtatgaaaagaggaacacaaacagcttcttaatatgcagtgtg

SEQ ID NO: 1970 - DNA, 529 bp, Homo sapiens
  misc_feature 512: n = A,T,C or G
aaaagccagagcaagtgccagtgtggatggtcctcaccctgcaagaagctggaaaactcctaggaatgcattgtcctcaccttgttatacctgcgtggcaccatggcaggattccacatttcatagaatacaggttttcaagcaaacccctgttgaccatgccctaatttcctattgatttctgttgtataattgaatggatattcctatggaaaattttttgtttcaaaatacaggaaaaacattcctattacctttctgaggctggctttccagcaattgtttcaaaggaaaatagatccccttaaagaaaaaatacaggctttagggaacaaagggacaagcagaacaggtgtggaagagagattttcaggaagggaaaaatttatagctacagagggtagttagaaaaatcataacttatatgtgaataaaatacatataagcagcatttacggtagtggcattctacttattaagatgcaatgaaatgaagaaaggctttatgttcnaggacctttgccatagt

SEQ ID NO: 1971 - DNA, 317 bp, Homo sapiens
acatgagggcaacaatcgtgtataatatctacttggcacttcacagagggcacgactctttccataaaaatatttagtatgttcatgatgtcttttatctaaagaatttcatgctttagatattagtcaattctcaaaacactactctgaggaaggtgagtgacacacccctttatagacgaagaatttgcagttgaggctggttaaatgtgactaactcaagattaacactggtggtaggagacttgtctctggcctcattctgtgcccatgacctgctctttgaccttcaggaagctttatagcctcctcctgtc

SEQ ID NO: 1972 - DNA, 342 bp, Homo sapiens
  misc_feature 149: n = A,T,C or G
actggctcactcagagaggacgtccttcaactatgccatgaaggaggctgctgcagcggctttgaagaagaaaggatgggaggtggtggagtcggacctctatgccatgaacttcaatcccatcatttccagaaaggacatcacaggtnaactgaaggaccctgcgaactttcagtatcctgccgagtctgttctggcttataaagaaggccatctgagcccagatattgtggctgaacaaaagaagctggaagccgcagaccttgtgatattccagttccccctgcagtggtttggagtccctgccattctgaaaggctggtttgagcgagtgttcatagg

SEQ ID NO: 1973 - DNA, 319 bp, Homo sapiens
acttacaatgggaacattgagttcccatggaaggctctcaatgggaaaatgctccaccaagcttagccggactgggatctcctcactcccagacttctcagctccatgccttaaaatgatgtcgtcattacctgaggcctctgaattcggatctttgtttcagggtctatgtgtctcaaggagggctggaaattactatagatggactccaggtggatggaatcatcatcttggcagatgtcaaagccaatgttttggaaggtcccaggagctggtccactgtcctcttcttgccacttgtataactgagacaatctgc

SEQ ID NO: 1974 - DNA, 336 bp, Homo sapiens
acatgaaatggttttgaaacaataggaacagataagtcccagataggaggctcactgatacttaattggccatgtcaccaatgtttgtttttaagggagtttggtggttgccatgttatcatttttttttattctttctttctttttctttctttctttctttctttctttctttctttctttctttctttctttctttcttttctttcttttctttcttcctcttcttcttcttttttgcaaataatttacaggcatatgtaaaatacagtaagaatactgggtcatagtttcatccagtgaaactctgtgacaatccttcactagaaggagagt

SEQ ID NO: 1975 - DNA, 534 bp, Homo sapiens
actatcccagccccccaggttcgcctaatagtcttggctacttccctacagctgctaatcttagcggtgtccctccacagcctggcacggtggtcagaatgcagggcctggcctacaatactggagttaaggaaattcttaacttcttccaaggttaccagtatgcaaccgaggatggacttatacacacaaatgaccaggccaggactctacccaaagaatgggtttgtatttaagggccccagcagttagaacatcctcagaaaagaagtgtttgaaagatgtatggtgatcttgaaacctccagacacaagaaaacttctagcaaattcaggggaagtttgtctacactcaggctgcagtattttcagcaaacttgattggacaaacgggcctgtgccttatcttttggtggagtgaaaaaatttgagccagtgaagccaaatcgtaacttacagcaagcagcatgcagcatacctgactctttgctgattgcaaataggcatttaaaatgtgaatttggaatcagatgtc

SEQ ID NO: 1976 - DNA, 374 bp, Homo sapiens
  misc_feature 335: n = A,T,C or G
gttttttgttttttgttttttggtttttatttttttgaggccggatcttactctgtcactcaggctggaatgcaaaggtgcaatctcagcttactgcaatctctgcctcccaggttcaagcgattctcctgtctcagcctcccgagtagctggggctacaggcacccgccaccggacccggctaatttttgtatttttagtagatatggggtttcaccatattagccaggctggtttcaaactcctgacctcgtgatccacccgcctcggcctcccaaagtgctgagattacaggcatgagccactgcgtctggcctttatttcttaaaaaatanaaagtataattattttagaaattgtgtgtaactatgcca

SEQ ID NO: 1977 - DNA, 54 bp, Homo sapiens
acaaattagcttcaagttacacatactgaacaaaagaggttgagcgagcgaagg

SEQ ID NO: 1978 - DNA, 399 bp, Homo sapiens
acagctgaaggagccggggagcagaaagtatatgtgtcaggtatgaggaagaaaatagattttggaagttatgagaaatgtagagagtgagttgagcatagtttgtgatttttagggcctctaacggtattaaagcagcggcagccgctgcacgcagacatgagggctaggctaaaacagtaaggtcaagttgtttggacagaaaggctacacggtgtggtcctggctcttgtgtaagaattctgaccgcactaaccatgcctaggaaggaaaggagttgttcttttgtaagggattgaggtttgggagattaatcggacatgatcagcaggaagagcacatgtgtttctatgagaattatgccgagataggtaacagatgaggatgaaatttgggctt

SEQ ID NO: 1979 - DNA, 160 bp, Homo sapiens
  misc_feature 127, 150: n = A,T,C or G
acatagagatctattttttctaaaacattcccctccccactcctctcccacagagtgctggactgttccaggccctccagtgggctgatgctgggacccttaggatggggctcccagctcctttctnctgtgaatggaggcagagacctncaataaagtg

SEQ ID NO: 1980 - DNA, 587 bp, Homo sapiens
  misc_feature 517, 518, 520: n = A,T,C or G
accaaggattttctattgcagcagaccatgctacgagtgaaggatcctaagaagtcactggatttttatactagagttcttggaatgacgctaatccaaaaatgtgattttcccattatgaagttttcactctacttcttggcttatgaggataaaaatgacatccctaaagaaaaagatgaaaaaatagcctgggcgctctccagaaaagctacacttgagctgacacacaattggggcactgaagatgatgagacccagagttaccacaatggcaattcagaccctcgaggtttcggtcatattggaattgctgttcctgatgtatacagtgcttgtaaaaggtttgaagaactgggagtcaaatttgtgaagaaacctgatgatggtaaaatgaaaggcctggcatttattcaagatcctgatggctactggattgaaattttgaatcctaacaaaatggcaaccttaatgtagtgctgtgagaattctcctttgagatttcagaagaaagganncnatgtgattcaagatatttacataccagaagcatctaggactgatggatcactgtcccgattcaaatt

SEQ ID NO: 1981 - DNA, 291 bp, Homo sapiens
  misc_feature 47, 120, 131, 200, 210, 246, 255, 263, 266, 271, 283: n = A,T,C or G
acaagctttttttttttttttttttttttttttttttttcttcggtncagtctaatcctttttgtagtcactcataggccaaacttagggctaggatgatgattaataaaagggatgacntaactattagnggcaggttagttgtttgtagggctcatggtaggggtaaaaggagggcaatttctaaattaaataataanaaggtaatanctactaaaaaaaattttatggaaaaagggacccggncgggggatntagggtcnaanccgcnctcgtaaggggnggattttt

SEQ ID NO: 1982 - DNA, 318 bp, Homo sapiens
  misc_feature 42, 59, 66, 82, 132, 303, 310: n = A,T,C or G
acaagcttttttttttttttttttttttttcttttttttttngaaacggagtctcactntgtcgcncaggctggagtgcagnggtgggatctcgattcactgcaacctccgccccccgggttcaagcgattntcctgtctcagcctcccaagtagatgggattacacgcgcctgccacgtttgtatttttagtaaagacggggtttcaccaccttggccaggctggtcttgaactcctgacctcaggtgatccaaaatgctgggattatgggtgtgagccactgcacctggccttaaacctgnctttctnaatgaaac

SEQ ID NO: 1983 - DNA, 306 bp, Homo sapiens
acgacatctcagacatgacttctattgccaggctggtcaagtggcagggtcatgagggagacatcgataagggtgctccttatgctccctgctctggaatccaccagcgggttatctgcgtttatggggctggggacttgaattggatgcttcaaaaccatcacctgttggccaacaagtttgacccaaaggtagatgataatgctcttcagtgcttagaagaatacctacgttataaggccatctatgggactgaactttgagacacactatgagagcgttgctacctgtggggcaagagcatgt

SEQ ID NO: 1984 - DNA, 114 bp, Homo sapiens
  misc_feature 97: n = A,T,C or G
accgttgcccatgcggggattaatgtgcagagctatgtcccctgaggagcccaccttgaagttgatagcaaagctcttgcctgtgggaggcacatancccttgatgatgatggt

SEQ ID NO: 1985 - DNA, 359 bp, Homo sapiens
  misc_feature 168, 315, 345, 346, 347: n = A,T,C or G
acctctgctatttgctgttattttatctgctatgctattgaagttttggcaattgactatagtgtgagccaggaatcactggctgttaatctttcaaagtgtcttgaattgtaggtgactattatatttccaagaaatattccttaagatattaactgagaaggctgnggatttaatgtggaaatgatgtttcataagaattctgttgatggaaatacactgttatcttcacttttataagaaataggaaatattttaatgtttcttggggaatatgttagagaatttccttactcttgattgtgggatactatntaattatttcactttagaaagctgagtgtnnnacaccttatcta

SEQ ID NO: 1986 - DNA, 422 bp, Homo sapiens
gagaatttattttatagtctaaatcacaaatactttactcaatttagtttttaaaatagtaaactgaatatttttgttgtaagcctatcagagtcaatccttcgtttggaattgttttcctgtttttccttactataaatcatttaaaaactgaattcattttcttagatggcataagtctgtctcttgagaaataagtaaaatactcctattttcagtatctgtagcacctgaaataggtctttgtatagccagaaacaagttatgttgaagttagcttttctttgtcaacagttttggacaataaaaatctgaaagtattaacacttgattttctactggggcccttcaaacttggttggaagaaattcaaccagaatatctacattagagtataatcatgtgtggtaggaagatggact

SEQ ID NO: 1987 - DNA, 213 bp, Homo sapiens
  misc_feature 28, 207: n = A,T,C or G
acaagcttttttttttttttttttttgnggctgaggctttattttgatcaggtaggcctaaggcaggggccatgctgcaggagcagggcctgtaaaccagtcaatgctgtcatgcaacacggggacagctcagggctgagctccacaggcgaggggccaggtaggcccttcaaagcagatacaaccactaacaggaaggaaggtaangctggc

SEQ ID NO: 1988 - DNA, 239 bp, Homo sapiens
tagacaaaaaggttggagcagaaagaaacgtgctcatctttgacctgggaggtggcacttttgatgtgtcaatcctcactattgaggatggaatctttgaggtcaagtctacagctggagacacccacttgggtggagaagattttgacaaccgaatggtcaaccattttattgctgagtttaagcgcaagcataagaaggacatcagtgaggacaagagagctgtaagacgcctccgt

SEQ ID NO: 1989 - DNA, 83 bp, Homo sapiens
acttagaactggcaaagactgtgaaactgttaaagtagaaagtctcagaggtccaatagtgatgcgggatgtttgcttcaagt

SEQ ID NO: 1990 - DNA, 459 bp, Homo sapiens
  misc_feature 438, 452: n = A,T,C or G
actgggccaactttgcgagaaatgggaaccccaatggcgagggtctgccacactggccgctgttcgaccaggaggagcaatacctgcagctgaacctacagcctgcggtgggccgggctctgaaggcccacaggctccagttctggaagaaggcgctgccccaaaagatccaggagctcgaggagcctgaagagagacacacagagctgtagctccctgtgccggggaggagggggtgggttcgctgacaggcgagggtcagcctgctgtgcccacacacacccactaaggagaaagaagttgattccttcattcacttcgccattcattcatacttccgtccatccattcagaaagcatttattaagaatttactcaggcatgatggcccatacttgtaatcccagctattgggaaggatgagatgggaggatggcnttgaggccagaggntttgaga

SEQ ID NO: 1991 - DNA, 126 bp, Homo sapiens
gcagaagtcccagtcatctgatctgctggaaagggagagggagagtgtcctgcgccgggagcaagaggtggcagaggagcggagaaatgctctcttcccagaggtcttctccccaacgccagatga

SEQ ID NO: 1992 - DNA, 141 bp, Homo sapiens
  misc_feature 36, 98, 124: n = A,T,C or G
gtacaagctttttttttttttttttttttttttttnggctttgcaaagcttttatttcatgtctgcggcatggaatccacctgcacatggcatcttanctgtgaaggagaaagcagtgcacganaaggaatgagtgggcgg

SEQ ID NO: 1993 - DNA, 571 bp, Homo sapiens
  misc_feature 521, 522: n = A,T,C or G
ccgaaaacagattactaagcaagttgtccatcttaacttagcagaagattgcatgaataagttcaagcttaatatagaaaagctctgcaaaactgaacaggacctcgcacttggaactgatgcagaaggacagaaggtgaaagattccatgcgagtactccttccagttctactcaacaaaatcatgataattgtgataaaataagagcaattctactttatatcttcagtattaatggaactacggaagaaaatttggacaggttgatccagaatgtaaagatagaaaatgagagtgacatgattcgtaactggagttaccttggtgttcccattgttccccaatctcaacaaggcaaaccgttaagaaaggatcggtctgcagaagaaacttttcagctctctcggtggacaccttttatcaaagatattatggaggatgctattgataatagattagattcaaaagaatggccatattgttcccagtgtccagcagtatggaatggttcaggagctgnnaggttctacacatgttttaacacccaaaaagctgttggatgatataaga

SEQ ID NO: 1994 - DNA, 452 bp, Homo sapiens
  misc_feature 379, 391, 398: n = A,T,C or G
acttacaatgggaacattgagttcccatggaaggctctcaatgggaaaatgctccaccaagcttagccggactgggatctcctcactcccagacttctcagctccatgccttaaaatgatgtcgtcattacctgaggcctctgaattcggatctttgtttcagggtctatgtgtctcaaggagggctggaaattactatagatggactccaggtggatggaatcatcatcttggcagatgtcaaagccaatgttttggaaggtcccaggagctggtccactgtcctcttcttgccacttgtataactgagacaatctgtacctgcccgggcggccgcccgggcaggtcacatccccacttggtggctgaggcataccgntctctggcttcngcacagngcccttttctgggacccccacgcaaacgcctgaagcaatcctaagatcctgctt

SEQ ID NO: 1995 - DNA, 229 bp, Homo sapiens
  misc_feature 120: n = A,T,C or G
acctatattatatgattccaaattgtgtgaggaaagtaaaaggctaacactgaaaaataactagcatactatgttcattttcaggtcttagggaaaataacatccaataaattaaatcantatggcttacttcatttatttatgtatgcttcacagctgcagcattcatacatgaacattcaaaactttataaaagattaaaatggttatatatacaaaatttcttttt

SEQ ID NO: 1996 - DNA, 491 bp, Homo sapiens
actcagctgcaaagataagttcactaatgagattttcttttttttttttttaaaaaaaaaaggtttttaatgagtcaaatttattacaaaaacttagtgtgtaatcaaagccaaatacattcctcaggcatgccagcggcaagcaaaataatgttaatagaatgttattaaaaaataaaactttttctgaatgatatatataaaacatcatggcacattatcatcatttgacaacagaaaacaggaagatatgtttcaatactgactttttgttgtttcaataaaggtaaaaaaacaaaaatttcaacagaacacataaattagaaattctagagggtaagccataaagaggtgttctcttccatgcaactgccagccgggcatggtggctcactcctgtaatcccagcattttgggagactaaggcaggcagatggcatgagctcaggagttcaagaccaacctgggcaaggtggcaagatcctgcctgt

SEQ ID NO: 1997 - DNA, 293 bp, Homo sapiens
  misc_feature 60, 62, 65, 71, 101, 103, 131, 147, 173, 186, 229, 230, 246,250, 258, 262, 270: n = A,T,C or G
acaagcttttttttttttttttttttttttttttttttattttttttttttttttttttngnaanaaaatngctttattatttttagttactacaaatatntnttataatatttactaaggaaaaaatcanaactcataacaataanaacttaaaaaatacccacaattcctntataccaaaaggnaaatgctttatatttaaatacaggggtttttcatgaaaatggnntgcaataattcttatnaaancattttgngatntgtaaagngcatgcagtccagtgtccaaggg

SEQ ID NO: 1998 - DNA, 131 bp, Homo sapiens
acttttttcttatgatgattggtgtagaaatgtgtgatttgggtgggcttttacatcttgcctaccattgcatgaaacattggggtttcttcaaaatgtgtgtgtcatacttcttttgggaggggggttgt

SEQ ID NO: 1999 - DNA, 348 bp, Homo sapiens
cagcgaacacagggctagacaagggaggagtttctcaaacggttttaatcggttctctccgcgtcacaagccatcgggtaaggcaacggaatgtgcgtggggtcccctgtggctccgcggtcacaatactgagcctggaattgctgttagcaaaatatacatttgtgtcaccataaaaaaccgcgccgccgcccctcgggtctcacaacaggtataaaaaattataaatatttacacccttgttacacgcttttacggaaaggggatcctaggagagcccccgggacaggacgcgggggcggtagaaagagcacaaagacaggagcgcccgccttccgggtcccagca

SEQ ID NO: 2000 - DNA, 511 bp, Homo sapiens
atccaaaatcccacaataaaaaaatcatttaaagctgtgtgtttcaaacttatcacttagaaataaaaacaaaacaaaacataaaaacaaagatcagtttgcaacataatttaaagaagcttctggtttaaaataccacagcagcaatataaagagctggtggcaatcacattcgggagtgaaatcgaaatcaatatattttgtccacatcagcatccaattacagtagttgttaaattcaatccaaaaagttattgctgaatttgtggcatggaatttgagaagatagtattgttcagcagcacaaccacagcagtaaaaatgagaacaggaggatttcattgcttttgagagctaaagggaccatgaggaggatatcttgctgattgcctgaagataatcctcagttacattcctgcatattacctgctttaaataaatgcaaatgacaaccaccttttcaggaggggcataataatgtaatccagaaactagaatgtttccccttctc

SEQ ID NO: 2001 - DNA, 243 bp, Homo sapiens
acaccaggaaggaagaggggttaagccttagatgaaatgaaatgcagagtttggcaaatggcagctggcacctctgcacatcagcataaggcgttgcttgtgaggccaaccacagcatctgcaataagcacgagagtcagtggccaccaaggctctgattcggtcatgaagttttcttcctgtccacagaagaggcagcaaactctatgggaagcactgctttgacctcaaggaaaaaacagt

SEQ ID NO: 2002 - DNA, 180 bp, Homo sapiens
  misc_feature 173: n = A,T,C or G
actacccatcagcaacttagcggccaggtgagttggtgcagaagcgcttcgggtgaattcataccagagccaccgggtgtgactcggctacctctcccaattaccacagggaggtcttaaaattgaatttcagtttcagcagatacttcagatttacctgagcaatatcatanacaatgt

SEQ ID NO: 2003 - DNA, 350 bp, Homo sapiens
  misc_feature 122, 141, 182, 185, 197, 203, 226, 241, 288, 321: n = A,T,C or G
acaagctttttttttttttttttttttttttttgaaggttctcaggtctttatttgctctctcaaattccaggaattgacttatttaattaatccatcaacctctcatagcaaatatttganaaaacaaatttatattcanattcttattttcagtagggaagtaagaagttgcagctcagngcncgtaaagttganacaganatggagacatccagccccacctntttggaacaagaaanatgactggggaggaaacacaggtcagcatgggaacaggggtcacagnggacacaagggtgggctgtctctccacctcctnacattatgctaacagggacccagacacat

SEQ ID NO: 2004 - DNA, 163 bp, Homo sapiens
cgtcgccggagtgaattgatccgggagttgaagagggctgcaaggtgggaagtgaagtcagtgcctcagttgctgatcagtgtgttttttgtgtccaattcttttatcaccaaaaaagagaagaaatattgcagtgaatgaagattcctctgcattttagcgc

SEQ ID NO: 2005 - DNA, 506 bp, Homo sapiens
  misc_feature 452: n = A,T,C or G
acttcaggatagcaaatatctatctgctattaaatggtaaatgaaccaagtgtttttttttgtttttttttttgagacagagtctcactgttgcccaggctggagtgcagtggtgcaatctcggctcactgcaagctctgcttcccaggttcacgccattctcctggctcaacctcccaagtagctgggactacaggcacccgccacagtgcctggctaattttttgtatttttagtagagacagggtttcaccatgtgagccaggatggtctcaatctcctgaccttgtgaaccacccgtctcggcctcccaaagtgctgggattacaggtgtgagccaccacgcctggcccatgaaccaagtgtttttaaggaaacaaaactattttttaatcatcagatttatactagctatatggatattagcatatctggtaattatgaatctagantttttttacatatttttataatactgttagctcagttattggatgagtgaaaga

SEQ ID NO: 2006 - DNA, 480 bp, Homo sapiens
acaatgctaatgtgtaaatttccaagttgctttttaaacactgggtggatttcaaaggaatgtgtgtctttaaaggtgaactgatggcattttatcgagaaagttcagagctgggctatggacttctgaagcagcagttcactggccgcctaaaataataattgtgataaaggtcaccaactccagaactgggccgaggaatgcaggaagaatttattcattaatgcaaacatttttaggtttagctaattccgtagaggcaggatcttgattatgtataatagttaaaataacttttcagttcacctgttgggaaattcagtttttcctaataaatgcatagcaatgtttcatgaaaaccacaaattataaaaacaattactgatatgtaaaaattgcctctgagtttttaaaacagagcagtggcattagagaacatgggctgccatacaaacagttcatgaaactggttatctggca

SEQ ID NO: 2007 - DNA, 554 bp, Homo sapiens
ctcttttgttaataatgaaatttgttctcttttcttaataatgaaatcttcccaaatgtttagccagtatttgtgaaaaacatggtttgtgcctcctcccaccactgccattcctgcaagggaacctgccctttgctgaagtagaataggataggttaaatgaatgaggatcattagataggataagttggaataggatgtatctccatccccaatcctttgtggtttttttctcatagtgtatctttgcctgtgcagaggcccgtgatctccattgatgaaccctttgatagatttgattaggaaaaacgtggtggggaatagaacaactggaaaagggatttgagttaaaatgtaaagacctggctttgaccactgcctctccccttattcactgatgaccttacacaagtcatctggcttcacaagagcactagtcacctaacttgttaagcaaaggtaaacatgatactttctgtacagcgttctcaagttttcctaaagagcaagtgaaataatgaatattaaaatgtcatagaaggccaggcgcggtg

SEQ ID NO: 2008 - DNA, 351 bp, Homo sapiens
accagtcaaaacttatgagaaaagtctaataaagcatttagggaaaaaattatatctttaaatatcttattacagaataaacatcgaaagcaaatcaagcatttaagatgttgcttattttatagcaaacacaaattaacaacgaagaaatgtttaagatgaaagcaggaatcaacgaaacatgtcagagatttaacaaaactaaaagctgattctgggagattaatataataggcagaactggcaaagctaaccaaaagaaaagcagagatgcaaaaaaataaaatggaagaaatgcaaaattgaacaattgccacattatgagaatggcaaaaattaggcaaatgaagt

SEQ ID NO: 2009 - DNA, 244 bp, Homo sapiens
  misc_feature 94, 155, 177, 227: n = A,T,C or G
ttttttttttttttttttttttttttttatttgaaacttttctaatttttaatttccaattttgcttaattcgaaaaaatacataccactttanagcaaataggacacaacgttaacaactgataactccaggtgaaggttatatggggttcacntgttatatatacatatatatgngtaatttttttttttttttttttttttttaaaacccacctctttttgtcncccaggctggaatgcag

SEQ ID NO: 2010 - DNA, 516 bp, Homo sapiens
cccttttcaactttttggaaaacgatttaatttattctaattagattaaccctattaatctatggattgggtatcaaaatgaatgccagtccagatgtgcctagacacgaaattggagctgaggactctcacgatatgcaagttcatccaacgtgaagataccataagctttttctctgaaccagagaaatgaaagtcagtttaagaggctgatagatcttggccctgttaaggcatccacttcacagttctgaaggctgagtcagtcccactccacagttaggccaagaattagattttaaaacttcatctgtctgtcccagttaactgttaaataaggcctcatcctccactgaagagtatggattgaaggattgtgaactatgtttagtgtggttgtgaacttggtgcctaatgttccatgtctgaagtttgccccagtgctacacgttggagtatacctatgtgtgtgctttgccactgaagtaagattttgcctgtatggtacctcggccg

SEQ ID NO: 2011 - DNA, 468 bp, Homo sapiens
  misc_feature 328, 446: n = A,T,C or G
ccaattcttgagctactaaccatcagctcttcttaatcaaagattgccatcagtgtagagtgtatctattggcacaacattctggtgttttgataacagtagaactcaatttcagtaactattaggagcatggtctgtgccctagcattaaaaatgttacttattattatgtgaatatcttgtattattatacaatgcagtattcaaatttgtccttgtagtgcagagatgactgataatttctaaaagattcgatccttaaaacttgtttccaagcagacttataaggaagctgatttttgagtcagaggccttaaacgtgttatanacaagtggcatcattttaagtccaaagtgaaacacttgatttgaataagctagtttataaactaaagctgttttcttatgttacagtatttcagtacatttcattccacataaaaagnatattaagtgtccctggttgtg

SEQ ID NO: 2012 - DNA, 330 bp, Homo sapiens
aaaattgatgtattttgtattgaatttaatgaatctcatgaacaaggtggtcatgaaaaattttgattctaaagtccaaggttggttgactaaaaagctctaattttggagatggaagtgcaaagtattatacttaatgttttctctgttttgtcatttccttgattaggctaaagtgaacaactccagcctgataggtttaggatacactcagactctaaagccaggtattaaactgacactgtcagctcttctggatggcaagaacgtcaatgctggtggccacaagcttggtctaggactggaatttcaagcataaatgaatactgt

SEQ ID NO: 2013 - DNA, 444 bp, Homo sapiens
actcagctgcaaagataagttcactaatgagattttcttttttttttttttaaaaaaaaaaggtttttaatgagtcaaatttattacaaaaacttagtgtgtaatcaaagccaaatacattcctcaggcatgccagcggcaagcaaaataatgttaatagaatgttattaaaaaataaaactttttctgaatgatatatataaaacatcatggcacattatcatcatttgacaacagaaaacaggaagatatgtttcaatactgactttttgttgtttcaataaaggtaaaaaaacaaaaatttcaacagaacacataaattagaaattctagagggtaagccataaagaggtgttctcttccatgcaactgccagccgggcatggtggctcactcctgtaatcccagcattttgggagactaaggcaggcagatggcatgagc

SEQ ID NO: 2014 - DNA, 473 bp, Homo sapiens
  misc_feature 457: n = A,T,C or G
acgatgtctagtgatgagtttgctaatacaatgccagtcaggccacctacggtgaaaagaaagatgaatcctagggctcagagcactgcagcagatcatttcatattgcttccgtggagtgtggcgagtcagctaaatactttgacgccggtggggatagcgatgattatggtagcggaggtgaaatatgctcgtgtgtctacgtctattcctactgtaaatatatggtgtgctcacacgataaaccctaggaagccaattgatatcatagctcagaccatacctatgtatccaaatggttctttttttccggagtagtaagttacaatatgggagattattccgaagcctggtaggataagaatataaacttcagggtggccgaaaaatcagaataggtgttggtatagaatggggtctcctcctccggcggggtcgaagaaggtggtgttgaggnttgcggtctgttagta

SEQ ID NO: 2015 - DNA, 547 bp, Homo sapiens
  misc_feature 507, 539: n = A,T,C or G
acttggaattgaattctcaagatcagggtttttcactcattttctgaccggtgtgcttccctttccccatttcccattattcccagctgtatagtagtgtagtgaaaatcacttgagatgtggaagagtagtctggtctaggaagagagggggaaaagtaagtttcccaggataagagggggaaaaaaggccccaaagccttctcaatgaggaatggggaaggaggttttgctgccaggttttactaagtacatttgaatgaaccctgctattgtagtcctcttttattaatgctttcctgacatttaccctgttagttgaggctcttcattgttcctgcactgagctgtagaattctcttttgttatagatttgcaaacaagactttcccagcagactgaaggtgagttgaagtgttcatattttttatttttgtctttgaaatagaattaaatgtagtaagacagttttctatatttattggcatatttttataccagtaatttngaccaaattttgacacagtgacacatagtggnatattcat

SEQ ID NO: 2016 - DNA, 525 bp, Homo sapiens
  misc_feature 458, 459, 460: n = A,T,C or G
acactccagtgtcaaacccgtcagtagttactgagcagtgtgctatggaggagaagagcagagtgtggaatggagggacctcaactaatctgaggagttgggggccagggtggtgttgagggaaggagtctctgagaaagtcatgctatgctcagaggcattgagttagctgatgtgggtgggaagcatggaatccggagcaagggaggactgaggacacatgttgcaggcagagatgtcttacacacacaggctactgcattcacatggatacgttgcaaccaagcgtgtttggtgttcattctcttgtgcagtggggtgggttatactaagatgcttcatgatttatggtttaatgaaaagaatacaagatagaagggagtccagaattctagttcctgcttcgtcattaaccagctatgaattctttggcaagtcactttttaatttctctgagnnntagtttactcatccataaaattaagataatatctttcctacttcacaagctttatgtaaagacca

SEQ ID NO: 2017 - DNA, 528 bp, Homo sapiens
  misc_feature 116, 118, 130, 246, 418, 443, 462, 464: n = A,T,C or G
acaagcttttttttttttttttttttttttttacacatacacaaaaatttaatttatgaaagaggcagtgttacaaatcactggggaaaggatgaacttttcagtaaatagtgcananacaaccacttcnaatatgaaaaatgttaagttgaatttctaactcataattttcacaaaaatcagttcaggacagactaaagacaaatgtgaaaggcaaaactataaaatttccacaaggcagtaaanaatatatttatgactttgggtaggaaaggatctccccccaaaccaatttgtattcagctttatatgatactttttaaaaacatttactttcagcaggaaataggcaacaatctataacattttacaatttccaaactcccctcctccaaaagtcaccgtaaaagttaacaanatatgtcgtcgctgttttgaacaanaaagattttcagagagggngnacacttcacatgaggcatgtatgagcttttctcaggcccactttgacatggagggactaaagta

SEQ ID NO: 2018 - DNA, 215 bp, Homo sapiens
  misc_feature 171: n = A,T,C or G
cccctatcagactacaggtgtttagaggcacagaaaaaggtgcagttgggttcttaatgtgaaatgatgagaagcacaactccagtgtgtctctttgtgtagaatgtcagcagacaccccctgctagatgtgctggatcatgggaaagcatttccatttgttactagattnttcagaagttttaatttatgatgggtgtggtggctcatgcctgt

SEQ ID NO: 2019 - DNA, 585 bp, Homo sapiens
acctatgtttcacctcctggaaatgaagaggtaagaatgttagccctaaagctaaagggggatgttacctttcccttctcaactaatatctatgttccctttcctcatttccttgaaggaagaatcaaaaatcttcaccactcttgaccctgcttctctggcttggctgactgaggaggagccagaaccagcagaggtcacaagcacctcccagagccctcactctccagattccagtcagagctccctggctcaggaggaagaggaggaagaccaagggagaaccaggaaacggaaacagagtggtcattccccagcccgggctggaaagcagcgcatgaaggagaaagaacaggagaatgaaaggaaagtggcacagctagctgaagagaatgaacggctcaagcaggaaatcgagcgcctgaccagggaagtagaggcgactcgccgagctctgattgaccgaatggtgaatctgcaccaagcatgaacaattgggagcatcagtcccccacttgggccacactacccacctttcccagaagtggctactgactaccctctcactagtgccaatgatgtgac

SEQ ID NO: 2020 - DNA, 532 bp, Homo sapiens
acacaaaccatcggaggagagagtaagagaaataattatcaatgctgttcggatagaacaggagttcctcactgaggccttgcctgtgaagctcattgggatgaattgcactctaatgaagcaatacattgagtttgtggcagacagacttatgctggaactgggttttagcaaggttttcagagtagagaacccatttgactttatggagaatatttcactggaaggaaagactaacttctttgagaagagagtaggcgagtatcagaggatgggagtgatgtcaagtccaacagagaattcttttaccttggatgctgacttctaaatgaactgaagatgtgcccttacttggctgattttttttttccatctcataagaaaaatcagctgaagtgttaccaactagccacaccatgaattgtccgtaatgttcattaacagcatctttaaaactgtgtagctacctcacaaccagtcctgtctgtttatagtgctggtagtatcaccttttgccagaaggcctggctgg

SEQ ID NO: 2021 - DNA, 469 bp, Homo sapiens
tgttttttaaaaaaataggatcattctgaactttgggatgacccccttatatattttctgaaaatgaaaacagttacatgaaaaaaatttccaatgaagatgtcagcattttatgaaaaaccagaagttattagatgaaagcagcgagtgaatctttaaaacagacttgatcacgcacacacaataagtctttctctccgaaaccggaagtaaatctatatctgttagaaataatgtagccaaaagaatgtaaatttgaggatttttttgccaatagtttatagaaaatatatgaaccaaagtgatttgagtttgtaaaaatgtaaaatagtatgaacaaaatttgcactctaccagatttgaacatctagtgaggttcacattcatactaagttttcaacattgtgttctttttgcattcattttttacttttattaaaggttcaaaaccaaaaaaaaaaaaaaaaaa

SEQ ID NO: 2022 - DNA, 115 bp, Homo sapiens
actctgaggcttgtaggagggtaaaatagagacccagtaaaattgtaataagcagtgcttgaattatttggtttcggttgttttctattagactatggtgagctcaggtgattga

SEQ ID NO: 2023 - DNA, 632 bp, Homo sapiens
  misc_feature 461, 462: n = A,T,C or G
actggtccaatcttatatcaatctatttacaattaaacagcaccatggttttcccacctaggttagttaaacatgcccagagaattgttattcaaagcatatgttcctttaaaataaaataaactcttaaaaagagagctcaaatcctcaacaaagaaagaccttttaccaatcgatatcatagatattgatgacatcaccaaatctgcttaagaaaaaaacagttttaaacacttttttccagttgacaaactttgagaagtgctgctattcgatgtggcacacaaatgaacaaaaactttgatgacaggagcaatatactgatttaccctaatatctccacctctaaacataaaaaaatctcctttgggattaatgctgtggtcttcacttgaatttagattcaatcatcagcaaatttaaattagatatagccacaatctttaaaatgattgcataannataaggaagtagttaaagctctcagaaacatgatgttacaattacagatatatttaatcaggcaataggaaattcaataccatttaaacattacatttaaactaattagcagtttcattttgtcattaaaattaataatgcacttcacatccaaacaggtgtggagggct

SEQ ID NO: 2024 - DNA, 421 bp, Homo sapiens
ctggaagacaattcagctttggataaaatgctgcagaatgtccagatgccctccaaaaaactggacttcattattttgaatgaaacaaaattttggtatcagatgatcttgcctcctcattttgataaatccaagaaatatcctctactattagatgtgtatgcaggcccatgtagtcaaaaagcagacactgtcttcagactgaactgggccacttaccttgtaagcacagaaaacattatagtagccagctttgatggcagaggaagtggttaccaaggagataagatcatgcatgcaatcaacagaagactgggaacatttgaagttgaagatcaaattgaagcagccagacaattttcaaaaatgggatttgtggacaacaaacgaattacaatttggggctggtcatatggagggt

SEQ ID NO: 2025 - DNA, 161 bp, Homo sapiens
acatttaagcccgcaaaacacaccaaagaatacaaacatagaagcaaaagccagtgccccttctgtaattccaccccaaggaagagactccaggaaagggtgcctccttcccactttctccacgtgcgggcaggcgtgcagggaggagtcctcacaaaaca

SEQ ID NO: 2026 - DNA, 537 bp, Homo sapiens
  misc_feature 444, 482, 483: n = A,T,C or G
acagtgccaccttgtgccaccgcactgtggtagaatactgagcaaatgtggtatttttaccccttggattctctgcctctgaaagttatactttaatccacatgttgtgtgttgaccaaacaatctatttatgtgtcttagtagcaggtgactcaaatctcgtgataaagaagtcataaagagttaataaaatgctgggtatcttcagccaaccataaaatgctaggtatctctggccaacctcactcgatttagaggatttatttctttaggccttgcctcattctagaaatgatctgaagtattttagtctactttgtggcatattcaatatccagagttaactaattaattttctgacctgcaaagaaggtcaaactctctttaatatttgatacaaaacaaaaggaaatatctattctgagcccctgaagaatggacaantttagttcatcaaataaaacaagaaaaaaatgaaatcnngctgtatttccttttacgtggctctttcctctttttatttttttggttcaactg

SEQ ID NO: 2027 - DNA, 225 bp, Homo sapiens
  misc_feature 123, 188, 217, 220: n = A,T,C or G
acaattggttctaaagtgctacaggaaccaggaaagagcaaaccagctgctcttcacactgtaagagtgtccaaatactcaactgactggcttagaagaaaaaaaatccatcaactttgtttntttttccacatacctcacatactatcttttctctatcacaggggctcttacctgaggtccatganctccctacagggtctataaatgaacttcngangccca

SEQ ID NO: 2028 - DNA, 347 bp, Homo sapiens
actttcaacaaactcaggtggtgtatcagggagacattttctgggtgtttttgtgtgttttctgtcttagaaaagaatgtgttctaatgcaaggatgtttctctgcaggagttattcctgatgaagctaaagctttgtctctgttggcaccagctaatgcagtggcaggtcttctgcctggtggtggactcctgcctactcctaacccacttacccagattggcgctgttccactggctgctttgggggctcctactcttgatcctgcccttgctgcacttgggcttcctggagcaaacttgaactctcagtctcttgctgcagatcagttgctgaagcttatgagt

SEQ ID NO: 2029 - DNA, 508 bp, Homo sapiens
  misc_feature 29, 60, 86, 186, 258, 296, 302, 319, 341, 436, 449, 478: n = A,T,C or G
ctttttttttttttttttttttttttttngcttttttaagaatttaaattatttcatctntttttattacttgacctaccattaanacaatctataacaaaaaaagtatattagcacacatggtataatcagactggtaatcaggaagcaatacaaaacggtcctttcgccatctatactttctanagcagtaaatctcataaattcacttaccaagcccgggaataatgacttttaaagccttgaatatcaactaanacaaattatgccaattctgatttctcacatatacttanattacncaaagataaagctttanatgtgatcattgtttaatgtanacttatctttaaagtttttaattaaaaactacagaagggagtaaacagcaagccaaatgatttaaccaaatgatttaagagtaaaactcactcanaaagcattatacngtaactaaatatacatgagcatgattatntacatacatgaaactgcaattttatggcat

SEQ ID NO: 2030 - DNA, 254 bp, Homo sapiens
accttttccccccacagatgagaagtgtttgtaatggatttgtatttttcttaattttatgctctttagacgtttaaaagaaccaaaaaagaaacttttgcttcttcgttttcggttgggatttgcagtttaatggcctcagatccttctccagatccccagggtttctttgtcttatttatggagaaaaaccggtcactttgtccagcgcactgtgaggcccccactcaggccagccctggcccccccttggt

SEQ ID NO: 2031 - DNA, 248 bp, Homo sapiens
actctgaggcttgtaggagggtaaaatagagacccagtaaaattgtaataagcagtgcttgaattatttggtttcggttgttttctattagactatggtgagctcaggtgattgatactcctgatgcgagtaatacggatgtgtttaggagtgggacttctaggggatttagcggggtgatgcctgttgggggccagtgccctcctaattggggggtaggggctaggctggagtggtaaaaggctcag

SEQ ID NO: 2032 - DNA, 216 bp, Homo sapiens
acattatagcacagtgatcatcattccattcatacactcaaataactgctgcttctgatcactgaaaactagattcaaagtcattgctcaacaagctgatactacaaatcccttatattaacaggtagtttaaatgtggaaataaggcaaagcatacttgttagtcacaattactttcagatataattgagactacactgctatacataattaggt

SEQ ID NO: 2033 - DNA, 152 bp, Homo sapiens
acacatatgagcctcgggatttacccctattgatagaaaacatgaagaaagcattaagacttattcagtcagagctataagagatgatggaaaaaagccttcacttcaaagaagtcaaatttcatgaagaaaacctctggcacattgacaaa

SEQ ID NO: 2034 - DNA, 513 bp, Homo sapiens
  misc_feature 459, 460, 500: n = A,T,C or G
acgatgtctagtgatgagtttgctaatacaatgccagtcaggccacctacggtgaaaagaaagatgaatcctagggctcagggcactgcagcagatcatttcatattgcttccgtggagtgtggcgagtcagctaaatactttgacgccggtggggatagcgatgattatggtagcggaggtgaaatatgctcgtgtgtctacgtctattcctactgtaaatatatggtgtgctcacacgataaaccctaggaagccaattgatatcatagctcagaccatacctatgtatccaaatggttctttttttccggagtagtaagttacaatatgggagattattccgaagcctggtaggataagaatataaacttcagggtgaccgaaaaatcagaataggtgttggtatagaatggggtctcctcctccggcggggttgaagaaggtggtgttgagggtnncggtctgttagtagtatagtgatgccagcagctaggactngggagagatagga

SEQ ID NO: 2035 - DNA, 361 bp, Homo sapiens
  misc_feature 80, 296, 312: n = A,T,C or G
tccaggcctacagcaacaatggaagcctcctcattaccattgaggacgtgaatgacaatgcaccctattttctgcctganaataagacttttgtgatcatccctgaactcgtgctgcccaaccgggaggtggcttctgtccgggccagagacgatgattcagggaacaatggcgtcatcctgttctccatcctccgagtagacttcatctctaaggacggggccaccatccctttccagggtgtcttctcgatcttcacctcctccgaggccgacgtgttcgctgggagcattcanccggtgaccagcctcnactccactctccaaggcacctaccaagtgacagtccaggccagggacag

SEQ ID NO: 2036 - DNA, 336 bp, Homo sapiens
  misc_feature 30, 94, 125, 128, 147, 180, 202, 213: n = A,T,C or G
gtacaagctttttttttttttttttttttngaaaatgagtcagttgattttattcattaaaaatatgcataataaaaggccaagcacaaagctntttataaaaaggagcaaaatgtattttccanaanagttagataaaggcatganatgaatttcagttaaatggatctatttctttgngggttttgagaactcattttanacactgaatanaggctgttttacattataatcatagctagagattacatagatggagggaaaaaaagtcttttgctttaactcttactaaatttctataaagtattttaaaatcaatttaaaaaccaaatctgt

SEQ ID NO: 2037 - DNA, 259 bp, Homo sapiens
ctctcctccaggctccttcccagtgcctagaggtgctataggaaacatagatccagccaggggcttccctaaagcagtgcagcaccggcccagggcatcactagacaggccctaattaagttttccttaaaaagcctgtgtatttattttagaatcatgtttttctgtatattaacttgggggatatcgttaatatttaggatataagatttgaggtcagccatcttcaaaaaagaaaaaaaaattgactcaagaaagt

SEQ ID NO: 2038 - DNA, 347 bp, Homo sapiens
accttattatcctacatcgcaaatttcaacagctacattatatttccttctgacacttggaaggtattgaaatttctagaaatgtatccttctcacaaagtagagaccaagagaaaaactcattgattgggtttctacttctttcaaggactcaggaaatttcactttgaactgaggccaagtgagctgttaagataacccacacttaaactaaaggctaagaatataggcttgatgggaaattgaaggtaggctgagtattgggaatccaaattgaattttgattctccttggcagtgaactactttgaagaagtggtcaatgggttgttgctgccatgagcatgt

SEQ ID NO: 2039 - DNA, 481 bp, Homo sapiens
  misc_feature 292: n = A,T,C or G
acctgtccctccaggcccatctcaaatcacaaggatttctctaaccctatcctaattgtccacatacgtggaaacaatcctgttactctgtcccacgtccaatcatgggccacaaggcacagtcttctgagcgagtgctctcactgtattagagcgccagctccttggggcagggcctgggcctcatggcttttgctttccctgaagccctagtagctggcgcccatcctagtgggcacttaagcttaattggggaaactgctttgattggttgtgccttcccttctctggnctccttgagatgatcgtagacacagggatgattcccacccaaacccacgtattcattcagtgagttaaacacgaattgatttaaagtgaacacacacaagggagcttgcttgcagatggtctgagttcttgtgtcctggtaattcctctccaggccagaataattggcatgtctcctcaacacacacgg

SEQ ID NO: 2040 - DNA, 347 bp, Homo sapiens; identical to SEQ ID NO: 2038

SEQ ID NO: 2041 - DNA, 346 bp, Homo sapiens
cccctatcagactacaggtgtttagaggcacagaaaaaggtgcagttgggttcttaatgtgaaatgatgagaagcacaactccagtgtgtctctttgtgtagaatgtcagcagacaccccctgctagatgtgctggatcatgggaaagcatttccatttgttactagattgttcagaagttttaatttatgatgggtgtggtggctcatgcctgtagtcccagcactgtgggaggctgaggcaggaggatcatctgaggccaagagttcaagatcagcctgggcaacatagtgataccctatctcttaaaaaagaagaagtttttaaatttgaaataataataggt

SEQ ID NO: 2042 - DNA, 536 bp, Homo sapiens
acaaaaattaacaccccattttgttaaaagttcccaaccacctcccaccataaatatacaaaaacctatttttagatatgtcaaaattgcatgcatgaatattttctaaagcttgaattttgctcttcactggataatgttatctatagctgtttctgtaacagactacataaacattgatatattatttaccatgcctttgaaactgtgcaggactttcataaacatggggaacaaaataaatagagtaaaaactgcaacagttttgtttagatgcaagtgcaattgggaaagctttcgaatttcaggattataaaactactataaaagtatttattctgttgttggcttagccacttgtattcaagcattatttgcagcattgctttacagcagttggtgctagaagatacaaaacatatagttaccactatttatacttgagggagaaaaaaaactttaaacaaccctgagggagacacacattaaaaatcttgttatttatttaaaaagttaaaaagttacatatcattatt

SEQ ID NO: 2043 - DNA, 450 bp, Homo sapiens
acaagctttttttttttttttttttttgcagtgatgccatttgctatgttttattttgctagtagcttattaaacataacatgcaaataatcaaagagaaacatacatgacttagagtgaaaaataattctagaaaagtttcactaggtaagtatgcaaattcttattctaaaaatacttctttaagtgcatgaagcttcatgtattttgcaatattcttggcctcaatatctaccacctattttttaaccagacaaatttgaatgtatcaagataatttggtgcaagagagtaacatccatatgtatttaatccaagctttgaggaacattaagatttaaggattataaaacttggctgatttccatgcaaccagtaaaaggttttgcacatcatttgacagtagaaataaaaaaacactaaatttacaaataaagcattgagtttgat

SEQ ID NO: 2044 - DNA, 394 bp, Homo sapiens
agttggtgacttgcatctgtggccttgaatattttattatcacatgtggcataacagtatccacactttttagttctttatttttttttttattttgagcaattctcctgcctcagcctcccaaatagctgggattacaggtgcatgccaccacacccagctaatttttgtatttttagtagagacaggttttcaccatgttagccaggctggtctcaaactcctgacctcagatgatccgcctgccttggcctcccaaagtgctgggattacaggtgtgggagccaccatgcctgacccacacactttttacttgtatagatgatttttggcttggacataaaagccaagccacccatttgcttttaatccaaagaacatgtatagtttttgt

SEQ ID NO: 2045 - DNA, 139 bp, Homo sapiens
cagttatgattggtggagaaccatatactcttggactttttgatactgcagggcaagaggattatgacagattacgaccgctgagttatccacaaacagatgtatttctagtctgtttttcagtggtctctccatcttc

SEQ ID NO: 2046 - DNA, 557 bp, Homo sapiens
  misc_feature 477, 527, 550: n = A,T,C or G
acaatttcctttagagaagtttcagaaccaagactaatttacatgaaaagctgtagagaaagtagttgaaaagtccattcataaaacttttattccacttacatgaatttaatacacgtgttcttaacaattatgcttggattgttcatgaaaatttcataagacattaaacaaagctagccatcatctcaagttatttccctgttaactatttttacagcacatgcatgttaggcaagtatcaaaaaaaaaaaatcacaaaagcaaaaatcctaaaaaaaagttaaatacatgggtttttgttttactgctgtgcttgatatacatgaagtaatgaataccaagcaattcatttttcctgcatctttacttttacatttgttcttaggttgcctaaaacatttaaatacaaataaaatgagtgtagcaaaaataatgaaagctaacagcaggtaactttacaaataatggaatgtnaaccgtttctgcccttatccagagtaaaatgggtcacaactttgtctaangaacacttctgcagctgtagtcnaaggtgt

SEQ ID NO: 2047 - DNA, 292 bp, Homo sapiens
acaggccctttgatggcttgggttacagacaacctcatagctggtgcaccacacacacgagataaaacaggaagcctaaaaaccccaagccacaccaagaaaaatgagagaggggagggcggggtaacaatgcagcatcccgcggagggaacttaatgcacaaggagggagaacagagggtggaaggcaagccagcttcgtcttcgccgccgcagctgctgtgtggtggtcaggggactgagttcaacaggtccttcaggaagctctctggatcggtgatttctgataaaag

SEQ ID NO: 2048 - DNA, 153 bp, Homo sapiens
gtctcgacgtggggcggccagcgatgaagccgcccagttcaatacaaacaagtgagtttgactcatcagatgaagagcctattgaagatgaacagactccaattcatatatcatggttatctttgtcacgagtgaattgttctcagtttctcg

SEQ ID NO: 2049 - DNA, 451 bp, Homo sapiens
  misc_feature 36, 53, 127, 133, 140, 164, 177, 197, 201, 208, 232, 245,291, 338, 342, 394, 405, 438: n = A,T,C or G
acaagctttttttttttttttttttttttttttttngggaaactgaagaattnttttatttagtgggaaagaagtaggtaaatgacagacagctcatattctgttaaacagaaaaaaaaaaagaatncaaacntcacagngatgaattttcacaaagctaacanatttgaactacanagcaatggaatatttataancaanatgtcanggccattaatgaccaaattgcatntaactgggttttntaagctcaaaaacatttaaaatctcaaacttaaaatttaaatctanacatgacaattgtaagcataccactcagtcatttaaaactattcagngagngctactcttcctgcataaatatttttttcctaacattattttttctcccaanatttaaaatgncacatctcatgttcctactagtaatcacacatnttataaaaagaat

SEQ ID NO: 2050 - DNA, 472 bp, Homo sapiens
aaaaattattacaatgatactgaaagatattttattggccttttaaaagacaaacacaaatgagaattatcttatttagaaaattaactttgaaaattatcttaaatgaaataaatataatatctaatacaatctcttcctgcaagatctcttaagatgggcaatcctaaaaatgcagcttcccatctgaaaatccctaaaactagtatgtcccttaaaataaaatttatttttcttataaaggacatttggtattcccacattttcttaaaatttgccctaaaacaaattctatctttaacactcacgtttctaaatatatatatgtgtgtgtgtatatatatgtgtatacatatacacatatatatttagttcacttaatttaaaattagtgaaagctatctggacacaatttctaagaaaacattgcagaaagtaagttatgcatggttatttacaggaagagttttcc

SEQ ID NO: 2051 - DNA, 453 bp, Homo sapiens
actattttttattttataaatgaacagggttttaacgtgctcaactttaatttttttcaattgtatgaaggccttaaaaaagctacattaagcgtagctaaaattatttattggactaaaaactaacagaacttcatttccagaatttttttttttttttttttttggcaaatgtttacattcaattaaggggaaaaagtagaaccagcacaaatgagtggcagttgctggagcataactgcttcaataaatcttcatcttggggtaattacaggcaagtcattttcacatcctcttgaggttcagagcatcagaatgaactctatgaatacatgtgtaagtgccagacagctgaatctttatcaggtattgtaaagatacacatatgatatgtttattaaaattgaaataatgtaaaacacatgaataaatttgcaaaaccaagatcacagt

SEQ ID NO: 2052 - DNA, 362 bp, Homo sapiens
ctttgattagacactatgtgctttttttttttaaccatagttcatcgaaatgcagctttttctgaacttcaaagatagaatcccatttttaatgaactgaagtagcaaaatcatctttttcattctttaggaaatagctattaccaaagtgaaggtgtagataatacctagtcttgttacataaaggggatgtggtttgcagaagaattttctttataaaattgaagttttaagggacgtcagtgtttatgccatttttccagttccaaaatgattccattccattctagaaatttgaagtatgtaacctgaaatccttaataaaatttggatttaattttaaaaaaaaaaaaaaaaaaaaa

SEQ ID NO: 2053 - DNA, 397 bp, Homo sapiens
  misc_feature 33, 35, 86, 130, 212, 263, 274, 354, 370, 378: n = A,T,C or G
caagctttttttttttttttttttttttttttngnaaaagtcatggaggccatggggttggcttgaaaccagctttggggggttcnattccttccttttttgtctaaattttatgtatacgggttcttcnaatgtgtggtagggtggggggcatccatatagtcactccaggtttatggagggttcttctactattaggacttttcgcttcnaagcgaaggcttctcaaatcatgaaaattattaatattactgctgttaganaaatgaatgancctacagatgataggatgtttcatgtggtgtatgcatcggggtagtccgggtaacgtcggggcattccggataggccganaaagtgttgtgggaanaaagttanatttacgccgatgaatatg

SEQ ID NO: 2054 - DNA, 388 bp, Homo sapiens
  misc_feature 357, 359, 360: n = A,T,C or G
gaaacttctcagcatcacgatgaccttgaataaaaattgcacacactcagtgcagcaatatattaccagcaagaataaaaaagaaatccatatcttaaagaaacagctttcaagtgcctttctgcagtttttcaggagcgcaagatagatttggaataggaataagctctagttcttaacaaccgacactcctacaagatttagaaaaaagtttacaacataatctagtttacagaaaaatcttgtgctagaatactttttaaaaggtattttgaataccattaaaactgcttttttttttccagcaagtatccaaccaacttggttctgcttcaataaatctttggaaaaacacanannaaaaaaaaaaaaaaaaaaaaaagcttgt

SEQ ID NO: 2055 - DNA, 162 bp, Homo sapiens
  misc_feature 55, 116, 117: n = A,T,C or G
gtacaagcttttttttttttttttttttttttttgcttttttacatttttataanaatatataaaaaatgatataaatggacatttaccggtagtgggggaaggcatatatctacnntaaaaggcaggacatttttaaaagctctattttctaaatgaaaac

SEQ ID NO: 2056 - DNA, 121 bp, Homo sapiens
actgattttaaaaactaataacttaaaactgccacacgcaaaaaagaaaaccaaagtggtccacaaaacattctcctttccttctgaaggttttacgatgcattgttatcattaaccagtc

SEQ ID NO: 2057 - DNA, 336 bp, Homo sapiens
tctatagtcactttgccagctcaaaagaaaacaataccctatgtagttgtggaagtttatgctaatattgtgtaactgatattaaacctaaatgttctgcctaccctgttggtataaagatattttgagcagactgtaaacaaggaaaaaaaaaatcatgcattcttagcaaaattgcctagtatgttaatttgctcaaaatacaatgtttgattttatgcactttgtcgctattaacatcctttttttcatgtagatttcaataattgagtaattttagaagcattattttaggaatatatagttgtcacagtaaatatcttgttttttctatgt

SEQ ID NO: 2058 - DNA, 314 bp, Homo sapiens
acttaggcttggctgccctgtctggaacatggactttcttgcatgaatcagatgtgtgttctcagtgaaataactaccttccactctggaaccttattccagcagttgttccagggagcttctacctggaaaagaaaagaaatgaatagactatctagaacttgagaagattttattcttacttcatttattttttgtttgtttatttttatcgtttttgtttactggctttccttctgtattcataagattttttaaattgtcataattatattttaaatacccatcttcattaaagtatatttaactcaaaa

SEQ ID NO: 2059 - DNA, 139 bp, Homo sapiens
acttcccaggcaaataggcccctttgaggctcctgagtgccctcagatggtcaaaacccagttttccctctgggagcctaaaccaggctgcatcggaggccaggacccggatcattcactgtgataccctgccctccag

SEQ ID NO: 2060 - DNA, 304 bp, Homo sapiens
aaaaaatttttcactgggggccacgtgggtcattagaagccagagctctcctccaggctccttcccagtgcctagaggtgctataggaaacatagatccagccaggggcttccctaaagcagtgcagcaccggcccagggcatcactagacaggccctaattaagttttttttaaaaagcctgtgtatttattttagaatcatgtttttctgtatattaacttgggggatatcgttaatatttaggatataagatttgaggtcagccatcttcaaaaaagaaaaaaaaattgactcaagaaagt

SEQ ID NO: 2061 - DNA, 93 bp, Homo sapiens
acattttttaaagccgctagcaaagcaaatgtgcaggcatccaaaatgtttccatcgtggtcgaggcaaatgagatcacagtatagaacccag

SEQ ID NO: 2062 - DNA, 335 bp, Homo sapiens
  misc_feature 54, 79, 90, 172, 181, 186, 189, 193, 218, 280, 283, 325, 330: n = A,T,C or G
aagcttttttttttttttttttttttttttaccaaacaacttttatttgcatgnggttacttagtaaatagtaatcagngatcatcctanacagctgccaggcaacaaaaggagagacacatagaagcttttcaaggtatcaggttgcaaaaaaaaaaaaaaaaagtttcanagtgatcanaaagngancagngagcagtagtgaagccagaattttntttcccatgactcctgtagttctgtccctgtccccgcaaaccccaggaggggaaaaatgtanatncaaaactgtaaggcctcaaaccagttaggacaagtccctttntcgtnataat

SEQ ID NO: 2063 - DNA, 504 bp, Homo sapiens
ctcaaattgaaaaacgtattcaagaaatcattgagcagttagatgtcacaactagtgaatatgaaaaggaaaaactgaatgaacggcttgcaaaactttcagatggagtggctgtgctgaaggttggtgggacaagtgatgttgaagtgaatgaaaagaaagacagagttacagatgcccttaatgctacaagagctgctgttgaagaaggcattgttttgggagggggttgtgccctccttcgatgcattccagccttggattcattgactccagctaatgaagatcaaaaaattggtatagaaattattaaaagaacactcaaaattccagcaatgaccattgctaagaatgcaggtgttgaaggatctttgatagttgagaaaattatgcaaagttcctcagaagttggttatgatgctatggctggagattttgtgaatatggtggaaaaaggaatcattgacccgacaaaggttgtgagaactgctttattggatgctg

SEQ ID NO: 2064 - DNA, 221 bp, Homo sapiens; identical to SEQ ID NO: 726

SEQ ID NO: 2065 - DNA, 426 bp, Homo sapiens
actcttgccctggccctgttggcaatggggtgggcttgggtcagcctcacccatcagaccacaagctccaccagggcaggcagcccatgcagtgcccctgcccagagcacagcacctggcacagaagagcagacaataaataccggctgtgagaaacaaatgggataatccaagccgaatgcttggcatggtgcaaatgtccaataaatatcagctgtcattgtctgttgaataaatgaacaggtgggttggtggggctgggggccaagagccacaagctgaggtggcttgtgtctgaggagggaagggacccgctgttccctggggttcacgcttcctttcttgaggttgtgtcctccttccccacaccctgcaggcctgcccagctcttcgcggcaaagcgggccccagatgggtgtacctgcc

SEQ ID NO: 2066 - DNA, 298 bp, Homo sapiens
accattggtggccaattgatttgatggtaagggagggatcgttgacctcgtctgttatgtaaaggatgcgtagggatgggagggcgatgaggactaggatgatggcgggcaggatagttcagacggtttctatttcctgagcgtctgagatgttagtattagttagttttgttgtgagtgttaggaaaagggcatacaggactaggaagcagataaggaaaatgattatgagggcgtgatcatgaaaggtgataagctcttctatgatgggggaagtagcgtcttgtagacctacttg

SEQ ID NO: 2067 - DNA, 251 bp, Homo sapiens
actcctgattctgccgctcactatcagctcgcacatcgcccagctgggcttcaataccgctgatcagcgcctggatatgcgccagctgggctccaaagcgcgcctccgtttctgccagtgtgtcttccaaggcagctttcatgctcagctgtgactgcagctcaatctcaagaccctgaagggtgcgccgcaggtcagtaacctcggacctgctcatctggagctgctccgtgtggccagcgacctcccgg

SEQ ID NO: 2068 - DNA, 226 bp, Homo sapiens
ctgagccggagacaggcagttgtgaaaaacttcaggacaaaaatgtttcatttaaggacttgtgctgctaagttgaggccattgacggcttcccagactgttaagacattttcacaaaacagaccagcagcagctaggacatttcaacagattcggtgctattctgcacctgttgctgctgagccctttctcagtgggactagttcgaactatgtggaggagatgt

SEQ ID NO: 2069 - DNA, 390 bp, Homo sapiens
  misc_feature 321: n = A,T,C or G
acctccttagaccttcgtttcctcatctttaaaatgaggataacacgtgtcatgggtcagttttgaggactgaagataatgtaggtaaaacattattagaacagtgcttgagtgagtcagctctcaacaaacgttagctgtgattattgttattactattattacttttgctaccatctaagagctccagctgatttatggcagagccatgtctgatgtctgacagtccagtgtccatcccgtcaggaaccctcttcaacacaggtgtgtgtgcatttctttctgtaagtgtgtgtgcacatctgtatgcccacacacatncacgcttttagcaagcagaactgcctggtatggagtagactgcatggatctatggttagaacatgtgag

SEQ ID NO: 2070 - DNA, 408 bp, Homo sapiens
  misc_feature 361, 370, 385, 391, 397: n = A,T,C or G
actggattctataggtccaccattaaaagctggtatgggacaccaatttatacacataagggttagattaaaattttaattttttggttgatattaaactgaaatttatataactgaggtctgaatcttaaaaaaagtaaatgataaaaatttaatatagttaactgttcactgatatgtctattcacttcatcataacctatatatttaattaaaaatcaaattatgagtctgcaaatcagatgctatcaagcaaattgccatccagggtccataattctttttatatttttatctcagatgaatatatacgattcagtaaattttaatgttccaaattgttctaaaaaaaaaaattatnaaaagcttncagttaacagttggntaattnatttgnccccaacgaac

SEQ ID NO: 2071 - DNA, 281 bp, Homo sapiens
acttcagttggtgcacaaaatactgtcatttgctcaaagctggctgccaaatgtttggtgatgaaggcagaaatgaatggctcaaaacttgggagaagagcaaaacctgaaggggccctccagaacaatgatgggctttatgatcctgactgcgatgagagcgggctctttaaggccaagcagtgcaacggcacctccatgtgctggtgtgtgaacactgctggggtcagaagaacagacaaggacactgaaataacctgctctgagcgagtgagaaccta

SEQ ID NO: 2072 - DNA, 271 bp, Homo sapiens
acaaaatgaggccaagacacccttgaagaagttcttgttgaagctggctgtttccagtaaattcaaagagcttcaaaagggtatcatcaggcatgatagtttctgggacaagctcatctttgcaaagatccaggacagcctgggcggaagggttcgtgtaattgtcactggagctgcccccatgtccacttcagtcatgacattcttccgggcagcaatgggatgtcaggtgtatgaagcttatggtcaaacagaatgcacaggtggctgt

SEQ ID NO: 2073 - DNA, 453 bp, Homo sapiens
  misc_feature 421: n = A,T,C or G
acatggttcattacctattaaaatgagaattacattttctcagagaaaagtggaattccttgaagattttggttccgatgttaataagcttctgaatgcttatgatgaacatcaaacactcctgaaagaacaggattctttaaaaaggaaagcagaaaatggatcagaagaaccagaggaaaagaaagcacatacagaagatacaacttcatcatctacacagatgattgatggtgatttacaggcaaaccaagctgtatataattatagtgcgtggtatcaatataattatcagaatccttggaattatggacaatattatcctccccctccaacctgatgggaaaaatgtaaatttcaaatgcagtgtgtgaaaagtatgaaattattattttttttaatgagggatgtaaacagtatnagcttgttgtatttgataacctgtcttccttg

SEQ ID NO: 2074 - DNA, 560 bp, Homo sapiens
acacagaaaaatcgtataagtaaaactaacatcgttaacattatttactgtaagttatctttgtaagagtggtaaaatacattgtgttgttaaataatttcatttaaaaaatgcatcactttgtgtgtttttatattgctaaaaccataaggccagtctacaaggtttgtagataaaatagaaacataccttccttgaaaagcagaataaattttttaaaggcaggaaggaagtgtttgaaccatgtgtcaacaagctttactgtcaaagcaggcttttggtatgggaagaaaaatacttataaatacttgttttaatatttgctttattaaaatacatttaaaatacagcatttttaaatctctaagctcaacttgaagatataagaacagtaaatttgataaaaatgagaaattacattcccatttctttaacaatttgtaaattccaattatcctgaacatttaacaccatttacatattttattaatcacattttcttaaacatttgataagagatttaatattttgatccaactaccaaaaaagcagacttgtgt

SEQ ID NO: 2075 - DNA, 460 bp, Homo sapiens
acgtgggtagctgtgtggacaagtggttgggggtgtgtggacatcggtggtcacaggctgggagagtggtgtagccaagagagggagcatgagttggggccatagacagcgacagtctctgggtggcatgaccccggagggggcatgctgttccctgtgccaggcaccagggacagggacactgagaagttcgatgaatggagagggcgtgtgagctgtgaacatgtgtggccgtttctgtggcttgtgaaggtgacagccagactcccacgtgtgggctgcagatccaggggagttggtgggttacctggctatgtgcttgtgattgcagatggactatatttatgtctgtggaaagctaacccagcagttgctttgtggcccttgtagttgtgtatgggtgtgcggttgtgcatcttagcagcatgagtcaagtgagcgtgtgggccgtgggacagac

SEQ ID NO: 2076 - DNA, 517 bp, Homo sapiens
gccaaatgtttggtgatgaaggcagaaatgaatggctcaaaacttgggagaagagcaaaacctgaaggggccctccagaacaatgatgggctttatgatcctgactgcgatgagagcgggctctttaaggccaagcagtgcaacggcacctccatgtgctggtgtgtgaacactgctggggtcagaagaacagacaaggacactgaaataacctgctctgagcgagtgagaacctactggatcatcattgaactaaaacacaaagcaagagaaaaaccttatgatagtaaaagtttgcggactgcacttcagaaggagatcacaacgcgttatcaactggatccaaaatttatcacgagtattttgtatgagaataatgttatcactattgacctggttcaaaattcttctcaaaaaactcagaatgatgtggacatagctgatgtggcttattattttgaaaaagatgttaaaggtgaatccttgtttcattctaagaaaatggacctgacagtaa

SEQ ID NO: 2077 - DNA, 435 bp, Homo sapiens
actgccctggaaagccattcagtgaatttgacctattgctacctctttttcagtgagtctgccaaaaaagaggtggttgctgaagtggtaaaagccccgcaggtagttgccgaagcagcaaaaactgcgaaggtgagtggcatgctgtcctcagtttggaatgtgcttagggagataatcctaagaggcactggcattcgtcttactttgtgactgtccgcagtccagccatatacgctagcatcagaggtgcagcgcatacacaggtaatgctgcctcataccctggggtgcttgtttgggctctgcgggctcctctgatttgtattctctgtcctatctgctgggaggaggaatgtgggctcaggaatcagatgggcctcgactcctacctcagctatggcagcaacacagtgatggaatgggtggtggtgtg

SEQ ID NO: 2078 - DNA, 146 bp, Homo sapiens
  misc_feature 32, 62, 63, 68: n = A,T,C or G
acaagactcaagtaaatagaaaggcagctttnaatcacaaatcagtttttcagattttactnnggaancatatttaatgcacacatttgaatgttacacataaataattttaacgatggagtccaagttctggattttacattaga

SEQ ID NO: 2079 - DNA, 397 bp, Homo sapiens
acaatattgatctctgctgattgcttaaaatagaacctgattatctctactactacagcatctcctaagccaaacagccccaccacagaggaggcccactttcacagactggctaagaatcctctagagcattttaagtagttgctctgaattttgcacagcagtctaatacctacttttccctagagctattgcccagaggaacaggactgaggcagaaggggcacttggggatgatatggaaggatctataaggcaagtctaaagatttagtggccatgtcagatgtttggggaagggactctattttccagacatttcagatagccatcccgggctcacctgaggagtgctggcaaagacaagagtcccctgaatgcacatatggtctaagcgt

SEQ ID NO: 2080 - DNA, 325 bp, Homo sapiens
  misc_feature 294, 302, 313: n = A,T,C or G
ctcaagggctgaaaataaatagggaagatggagacaccctctgggggtcctctctgagtcaaatccagtggtgggtaattgtacaaaaaattgtcacactgtgacaacaaatataaaaacaatctgtaggtctgaaataaaaagactccactgtgaagaggacagtgtagacaaacggagattccaagtccaccaaaagaaataattgccttcagttctgagtccttgattggtaagaaaggctgggggctgggcttgaaaccatgttatcagacttaaaagagcatgctctgncttctgtncttcccatgtnctaaaatataaa

SEQ ID NO: 2081 - DNA, 174 bp, Homo sapiens
actaccaacaaaggtgtcagttgcttgtgctgccctgtctatgttatgctctgaataggtctcggtaaagattatatggaaatactataaagaatacataaggtaaaatactagtcagaaagggttcagaagaagttagcatcaactgtatgaaaattctaggtaaagctaagt

SEQ ID NO: 2082 - DNA, 220 bp, Homo sapiens
actcaaaatataagcagcttgaaactggctttaccaatcttgaaatttgaccacaagtgtcttatatatgcagatctaatgtaaaatccagaacttggactccatcgttaaaattatttatgtgtaacattcaaatgtgtgcattaaatatgcttccacagtaaaatctgaaaaactgatttgtgattgaaagctgcctttctatttacttgagtcttgt

SEQ ID NO: 2083 - DNA, 270 bp, Homo sapiens
accctagcctgcacctgtcctcatctctgcaaagttcagcttccttccccaggtctctgtgcactctgtcttggatgctctggggagctcatgggtggaggagtctccaccagagggaggctcaggggactggttgggccagggatgaatatttgagggataaaaattgtgtaagagccaaagaattggtagtagggggagaacagagaggagctgggctatgggaaatgatttgaataatggagctgggaatatggctggatatctggt

SEQ ID NO: 2084 - DNA, 347 bp, Homo sapiens
  misc_feature 295, 301, 307: n = A,T,C or G
acaagttgtgcaaagtgagaaagatctttgtgggcacaaaaggaatccctcatctggtgactcatgatgcccgcaccatccgctaccccgatcccctcatcaaggtgaatgataccattcagattgatttggagactggcaagattactgatttcatcaagttcgacactggtaacctgtgtatggtgactggaggtgctaacctaggaagaattggtgtgatcaccaacagagagaggcaccctggatcttttgacgtggttcacgtgaaagatgccaatggcaacagctttgncactcnactttncaacatttttgttattggcaagggcaacaaaccatggatt

SEQ ID NO: 2085 - DNA, 263 bp, Homo sapiens
  misc_feature 126: n = A,T,C or G
atttaagggaccacttaagacgagattagatgggctcttctggatttgttcctcatttgtcacaggtgtcttgtgattgaaaatcatgagcgaagtgaaattgcattgaatttcaagggaatttantatgtaaatcgtgccttagaaacacatctgttgtcttttctgtgtttggtcgatattaataatggcaaaatttttgcctatctagtatcttcaaattgtagtctttgtaacaaccaaataaccttttgtggtcactg

SEQ ID NO: 2086 - DNA, 346 bp, Homo sapiens
  misc_feature 260, 277, 301, 305, 317, 333: n = A,T,C or G
ccaccaccaagaggcgtcaccagcagaccgtaaccatcccccccaagtcctcgttgtccgttccatatgtcatcgtgccgctaaagaccggcctgcaggaagtggaagtcaaggctgccgtctaccatcatttcatcagtgacggtgtcaggaagtccctgaaggtcgtgccggaaggaatcagaatgaacaaaactgtggctgttcgcaccctggatccagaacgcctgggccgtgaaggagtgcagaaagaggacatnccacctgcagacctcantgaccaagtcccggacaccgagtntganaccagaattctnctgcaagggaccccantggcccaaatgac

SEQ ID NO: 2087 - DNA, 550 bp, Homo sapiens
gagacacagtaggagtagatctccaacaatcaaagctagacgtagcaggagtagaagctattctcgcagaattaaaatagagagcaatagggctagggtaaagattagagatagaaggagatctaatagaaatagcattgaaagagaaagacgacgaaatcggagtccttcccgagagagacgtagaagtagaagtcgctcaagggatagacgaaccaatcgtgccagtcgcagtaggagtcgagataggcgtaaaattgatgatcaacgtggaaatcttagtgggaacagtcataagcataaaggtgaggctaaagaacaagagaggaaaaaggagaggagtcgaagtatagataaagataggaaaaagaaagacaaagaaagggaacgtgaacaggataaaagaaaagagaaacaaaaaagggaagaaaaagattttaagttcagtagtcaggatgatagattaaaaaggaaacgagaaagtgaaagaacattttctaggagtggttctatatctgttaaaatcataagacatgattctagacaggat

SEQ ID NO: 2088 - DNA, 298 bp, Homo sapiens
acaagatacactggagaacaaagggaactcaagattcttccagccacatgtcacctgtaggtagaagtaaactctgcagtgcagcttctgctcttggcccctctggccagggcccctgtggcttcctgcacactggacaggtgactgtatggtagagactgtgatctgggaactttttgctgtacaacagctccaagacaacacttaattccagctatacgtggcaaaagatgttatggcagggaatagagaggtttaaatacagatgaaataaagggtcaccatctactcaggcaca

SEQ ID NO: 2089 - DNA, 363 bp, Homo sapiens
acctggatggtgtgtccaccatcgacacggaggggctggatttgtttctcaggcaatcctgtattttaattttagacgtatttcctgaagcatatttttcatagaatgtagcatgtaaatagcttttaaataacttcttttttataagagtaaaagtatctttaggaatttctttctatagagttcttcattaacatttatacgagttttttgctgagtcagatggacagttgggttctgatgctttttccttctcctttccttttattattattatttttttcttttaagaactaaggtattgcctgaaaaacaagtgatgtctgtgcagccttacactctgtctttacagaagcaaatagt

SEQ ID NO: 2090 - DNA, 52 bp, Homo sapiens
ctggatgtggttgcccccatttgtgtgtgtggttgtgtgtggttgtgtgttg

SEQ ID NO: 2091 - DNA, 288 bp, Homo sapiens
actccggcagggagggtgacaagcacaccctgagcaagaaggagctgaaggagctgatccagaaggagctcaccattggctcgaagctgcaggatgctgaaattgcaaggctgatggaagacttggaccggaacaaggaccaggaggtgaacttccaggagtatgtcaccttcctgggggccttggctttgatctacaatgaagccctcaagggctgaaaataaatagggaagatggagacaccctctgggggtcctctctgagtcaaatccagtggtgggtagttgt

SEQ ID NO: 2092 - DNA, 246 bp, Homo sapiens
actactaccttgaccctgcatattaggaaaaataaattccttggcattaggagaaagagcagaggttttctgctgttgttgctgctgtggtggtggtggtggcggtggcggctgggctggctgctgctgttgctgtggctgctgctggctacccaagccaagcccatacagagagtgcattgaggaagagatggctttctgcttcaagaggtcattcacattcaagccgaggttgatgggagaagt

SEQ ID NO: 2093 - DNA, 486 bp, Homo sapiens
  misc_feature 416, 417, 452, 457: n = A,T,C or G
actcatgcccgactgtctaccaggcacacagactttgaggagagggcgtatgtcgtcttgatccgcatcaatgatgggggtcggccacccttggaaggcattgtttctttaccagttacattctgcagttgtgtggaaggaagttgtttccggccagcaggtcaccagactgggatacccactgtgggcatggcagttggtatactgctgaccacccttctggtgattggtataattttagcagttgtgtttatccgcataaagaaggataaaggcaaagataatgttgaaagtgctcaagcatctgaagtcaaacctctgagaagctgaatttgaaaaggaatgtttgaatttatataacaagtgctatttcagcaacaaccatctcatcctattacttttcatctaacgtgcannataattttttaaacagatattccctcttgtccttnaatanttgctaaatatttcttttttgaggtggag

SEQ ID NO: 2094 - DNA, 322 bp, Homo sapiens
taacaagcactatattgaagagaggttacataaataaaagtgaaacgaggcttggatcccttcatgtatgggggaaaggaactactcctgtcaatgcagttactctaacgtataacggaaataaaaattcgcttccttttaatgaagacactaccaacatgatattacgtattgatctgaccacacacaatgttactctagaagaaccaatagaaatcaactggtcatgaagatcaccatcaattttagttgtcaatgggaaaaaacaccaggatttaagtttcacagcacttacaactttccctcttcacttggttcttgt

SEQ ID NO: 2095 - DNA, 437 bp, Homo sapiens
  misc_feature 416: n = A,T,C or G
accctctcagctccaggtggctctgaggtgcctgtcccacccccacccccagctcaatggactggaaggggaagggacacacaagaagaagggcaccctagttctacctcaggcagctcaagcagcgaccgccccctcctctagctgtgggggtgagggtcccatgtggtggcacaggcccccttgagtggggttatctctgtgttaggggtatatgatgggggagtagatctttctaggagggagacactggcccctcaaatcgtccagtgaccttcctcatccaccccatccctccccagttcattgcactttgattagcagcggaacaaggagtcagacattttaagatggtggcagtagaggctatggacagggcatgccacgtgggctcatatggggctgggagtagttgnctttcctggcactaacgttga

SEQ ID NO: 2096 - DNA, 248 bp, Homo sapiens
actggcaacctaaacttaacatataaaagaagcacttcataactaataaagtattaaaaactttaaaacatgtcatttaaacaatcccaccatcaggaaaacatgctttgaaccattttcaagaagtgatcatgtgaatgcattaatttacttgttttaaattttttgttgttgttgttaatgcttatatattggaccaatggaacacatttgtttggctggggttcagacacacagtttgtggtgtg

SEQ ID NO: 2097 - DNA, 210 bp, Homo sapiens
accacgttccttcaaagagtgaatctattgaaccctggggaatatagttgaccaaatgatgggtgtcctctctgagcttcatgttttcagcgaagacatctggtgccacaccagttcttgaatcaagccttgatttaagatcacataaacttgctgttattttatcaagagcagaccccggtgtagcatcttgtgtgactttaagagagt

SEQ ID NO: 2098 - DNA, 503 bp, Homo sapiens
gaggagccattgatgtgtgcttattgtgtaacagaacctggagcaggctctgatgtagctggtataaagaccaaagcagaaaagaaaggagatgagtatattattaacggtcagaagatgtggataaccaacggaggaaaagctaattggtattttttattggcacgttctgatccagatcctaaagctcctgctaataaagcctttactggattcattgtggaagcagataccccaggaattcagattgggagaaaggaattaaacatgggccagcgatgttcagatactagaggaattgtcttcgaagatgtgaaagtgcctaaagaaaatgttttaattggtgacggagctggtttcaaagttgcaatgggagcttttgataaaaccagacctgtagtagctgctggtgctgttggattagcacaaagagctttggatgaagctaccaagtatgccctggaaaggaaaactttcggaaagctacttgtagagcaccaagc

SEQ ID NO: 2099 - DNA, 122 bp, Homo sapiens
cgagcggccgcccggcaggtacaagctttttttttttttttttttttttttttttttttttttttttttttttttttttttttttttttttttttttttttttttttttttttttttttttt

SEQ ID NO: 2100 - DNA, 115 bp, Homo sapiens
  misc_feature 60: n = A,T,C or G
acccaccacaggagctcttcccgaggggcacaaatccttttgccactgtcaagcttcgtnccaccatcaccaatgaccgctcagcacccctcatccgctgaggcggggtccgagg

SEQ ID NO: 2101 - DNA, 330 bp, Homo sapiens
acaatagatgcaacgccaaaatgagatgaaagagaattcagaataaaattccgtcccttggagcatattccattggctttctctgctcctgcttccgctggtatctggccttctggtagaaaatgatgatggttacagtgactatatttagaagaatgacgagcagtatgagccagaacgagtatccgtaactgtgggtcgttcctttactggtggttgtcgggtaaagcatttggaacaactcttcggagagttggttggactgcgtgttcgccacaaacagtatcatggtcacaaaaacgaaggatgcaccgagcccgttccaggtgt

SEQ ID NO: 2102 - DNA, 362 bp, Homo sapiens
  misc_feature 357: n = A,T,C or G
actcggttaactgccaggtgggtgacagtgatgccaggctcgcccactactgcactggacacagcctcaccaatgccaccttcataataatggtcctccacggtgaggatcctgcccttggtggcacgagcgctgtcgagaatgagttttctgtccaggggcttgatggtgaaggggtccagcacgcggatgttgatcttttctttcttcagcagttcggcagcggccaaggcctcgtgcagggtcaccccagccccgataacggtcacctggtcatccttgctcttcaggaccaccttggcttgtccgacctggaagtcctcattgttgttataatgatggcattttctgggcggntggtc

SEQ ID NO: 2103 - DNA, 154 bp, Homo sapiens
acaatttaatttaaaccagaccaccttaacaagcactatattgaagagaggttacataaataaaagtgaaacgaggcttggatcccttcatgtatgggggaaaggaactactcctgtcaatgcagttaccctaacgtataacggaaataaaaat

SEQ ID NO: 2104 - DNA, 131 bp, Homo sapiens
  misc_feature 82: n = A,T,C or G
cacaacttgtaaggtggttaggttttaaagaccgtgcctaaggacaaaattgagcatgctcagaatggtccttgaaaatctnctaaattaccaataaatttctctttgtagtcttaaagtttaaatccctg

SEQ ID NO: 2105 - DNA, 431 bp, Homo sapiens
atgccaaagctataatggaaaacaagtttacaaagagacctgtatttctttcataaaagacttcttggcaaaaaatttgattatagttattggaatagcatttggactggcagttattgagatactgggtttggtgttttctatggtcctgtattgccagatcgggaacaaatgaatctgtggatgcatcaagctatcgtcagtcaaacccctttaaaatgttgctttggctttgtaaatttaaatatgtaagtgctatataagtcaggagcagctgtctttttaaaatgtctcggctagctagaccacagatatcttctagacatattgaacacatttaagatttgagggatataagggaaaatgatatgaatgtgtatttttactcaaaataaaagtaactgtttaaaaaaaaaaaaaaaaaaaaaaaa

SEQ ID NO: 2106 - DNA, 613 bp, Homo sapiens
  misc_feature 536: n = A,T,C or G
acaattcatagggacgaccaatgaggacagggaatgaacccggctctcccccagccctgatttttgctacatatggggtcccttttcattctttgcaaaaacactgggctttctgagaacacggacggttcttagcacaatttgtgaaatctgtgtagaaccgggctttgcaggggagataattttcctcctctggaggaaaggtggtgattgacaggcagggagacagtgacaaggctagagaaagccacgctcggccttctctgaaccaggatggaacggcagacccctgaaacgaagcttgtccccttccaatcagccacttctgagaacccccatctaacttcctactggaaaagagggcctcctcaggagcagtccaagagttttcaaagataacgtgacaactaccatctagaggaaagggtgcaccctcagcagagaagccgagagcttaactctggtcgtttccagagacaacctgctggctgtcttgggatgcgcccagcctttgagaggccactaccccatgaacnttctgccatccactggacatgaagctgaggacactgggcttcacactgagttgtcatgagagggacaggctctgtcc

SEQ ID NO: 2107 - DNA, 458 bp, Homo sapiens
agaaaatactaattaataatagtaagttgttagtgttggttaagttgttgcttggaagtgagaagttgcttagaaactttccaaagtgcttagaactttaagtgcaaacagacaaactaacaaacaaaaattgttttgctttgctacaaggtggggaagactgaagaagtgttaactgaaaacaggtgacacagagtcaccagttttccgagaaccaaagggaggggtgtgtgatgccatctcacaggcaggggaaatgtctttaccagcttcctcctggtggccaagacagtctgtttcagagggttgttttgtttggggtgtgggtgttatcaagtgaattagtcacttgaaagatgggcgtcagacttgcatacgcagcagatcagcatccttcgctgccccttagcaacttaggtggttgatttgaaactgtggaggtgtgattttttcaggag

SEQ ID NO: 2108 - DNA, 417 bp, Homo sapiens
  misc_feature 133: n = A,T,C or G
gccagcgactgtctcagactgggcagggaggctttggcatgacttaagaggaagggcagtcttgggcccgctatgcaggtcctggcaaacctggctgccctgtctccatccctgtccctcagggtagcaccanggcaggactgggggaactggagtgtccttgctgtatccctgttgtgaggttccttccaggggctggcactgaagcaagggtgctggggccccatggccttcagccctggctgagcaactgggctgtagggcagggccacttcctgaggtcaggtcttggtaggtgcctgcatctgtctgccttctggctgacaatcctggaaatctgttctccagaatccaggccaaaaagttcacagtcaaatggggaggggtattcttcatgcaggagaccccaggccctgg

SEQ ID NO: 2109 - DNA, 505 bp, Homo sapiens
caatagtgtctcttggggaccatggattcccttgagactccagtgaatgctttggacactctacccagataaactcacaatcaaatacttgcttataatttcaaaggatcctatgaccctctggagtccatccaaccatgattacatcctatgaactgagctgcccctccagagtcaccactgcaactgcccatcccccagcagtcgccaggcacagggctccggaaatgggcaggcagatccactcagcggtgcatatttccaagacagatgaccctcatttccatcacagtttgaaggcccttgtggcaaggaggaatggctgtgcttgctaaagggaaagtcacaggaaagaaagagggtacttgaccccacagccatctgggatgagccgcttttcagccaccatgtcttcaaattcatcagcattgaacttggtgaagccccacttctttgagatgtggatcttctggcggccaggaaacttgaacttggccctgcgcag

SEQ ID NO: 2110 - DNA, 503 bp, Homo sapiens
acaaactaaaattatgggagaggaaactatgagtgaaacgatgagaaaaacctaatgcatgatgtagaactgagtggtgttaatagcagagcactggagggaagggccacaaaactcttcaccccaaggtctagaatcattctagaatcatcctacaagcctagttttcatgagattcagccctattttatttcttgctcttggaattatatgaaattacgaatttctgtgtgttgccagctgtaatagaataccctggaattttatttacttttaattttgtttatttatttatgcttatgtgccatcttctcatgaaaaagaggcagtatgttaaaagtttgagttcagattttctgatgtagataaataagctaaagaaggcagggtgaagtgtgatatatgagaatttccagagcagggtattcgtaacttgtaagtatttagtccaagttccctctcccaacacattttacactagaataagattgaaaggccagatg

SEQ ID NO: 2111 - DNA, 441 bp, Homo sapiens
  misc_feature 40, 54, 187, 252, 285, 365: n = A,T,C or G
acaagcttttttttttttttttttttttttaagcttgaanatgcttttattganaaggagagggactgaacagattcttgacaagcctaggcataaatgctccaggtttgggaaagaggtaaaataaataggtggttactggggaggctccaacacagccagaagggacactgtttgcttcagcctntgggcctgtccattgtttttgctgtgtgagctggggtgtggggtttgctgcaaactgggatccanaagaggaattctcggggctctaatgggtatcanatctgccatcttgcatcagcggggcctggttcttggaggtgtctaagctggtgcctaagggcttatccccagcatccttntgacagcctccagccgggacaggattcgtggggcctcctgtggacatagcatctgtagctccccaggtcttatgcg

SEQ ID NO: 2112 - DNA, 457 bp, Homo sapiens
  misc_feature 33, 59, 69, 91, 121, 126, 155, 186, 249, 285, 329, 352, 391,420, 452: n = A,T,C or G
ctttttttttttttttttttttttttttttttnggcagtttttacatttatttaaacanaaaacgtgcncatgagctgcctactcattttnttcactgcgcagcctgacattggggttggngactntgatggccagttgggcagctctttccacnatggctttgcggttcttggaggaaacattgngagcgatctcggcacagtaagatttgttgcacatcagcagcacttccagctccttgacgttgnggaccaggaacttccggaagccactgggcaacatgngctttgtttttttgttgcttccataaccaatgttgggcatcaanatctggcccttgaatcttctacnaaccctgttgtcaatgcctctgggtttccgccagttacncttaattttgacatatcggtctgactggngccggatgaacttcttggttctctttttgacnatctt

SEQ ID NO: 2113 - DNA, 551 bp, Homo sapiens
acagagaagtgaaaagattaaattctacttctatttttcttttttttttttgagacggagtctcgctctgtcaccaaggccggagtgcagtggtgcgatctcggctcactgcaagctccgcctcccaggttcacgtcattctcctgcctcagcctcccgactagctgggactacaggcgcccaccaccacgcccggctaatttttttgtatttttagtagagacggggtttcaccatgttagccaggatggtctcaatctcctgacctcatgatccgcccgtcttggcctcccaaagtgctgggattacaggcatgagcaactgcgcccagccaaattctacttcttaaaaatcacaaaaactagtttaaattgatgacttgttcgtatgttcaaaatgtaacaacaaaaaaagctaacaccagtcatttatattaactttttttttttaaatcaaaaattgttaatgttagaaacatactatgaagtgcctttatctgcttagacctaaggaagattttaaagttgggttgcacaggaaatgatgatgct

SEQ ID NO: 2114 - DNA, 383 bp, Homo sapiens
  misc_feature 361: n = A,T,C or G
accttcattgcgatcaaaccagatggggtccagcggggtcttgtgggagagattatcaagcgttttgagcagaaaggattccgccttgttggtctgaaattcatgcaagcttccgaagatcttctcaaggaacactacgttgacctgaaggaccgtccattctttgccggcctggtgaaatacatgcactcagggccggtagttgccatggtctgggaggggctgaatgtggtgaagacgggccgagtcatgctcggggagaccaaccctgcagactccaagcctgggaccatccgtggagacttctgcatacaagttggcaggaacattatacatggcagtgattctgtggagagtgcanagaaggagatcggcttgtggtt

SEQ ID NO: 2115 - DNA, 317 bp, Homo sapiens
  misc_feature 305: n = A,T,C or G
accatacacacaacacaaacgacacagccagcaacagtggctgggctggttggtggggggcctctggcacctccaagtctcaggctctgtcacagagcagggcaggtctggtccgctcacagggtcctcacagccacgggatagaggagggacaagtgctcagcccctttgatgggtagctttctggtggtgtagtagtggatgacttccgggacactgtcgaacggagggctgttctgacccagaacgtatttctctttggttttggccagtttcatgtgcataaaaccctggttgctcctcanggagagggagta

SEQ ID NO: 2116 - DNA, 179 bp, Homo sapiens
ttaaaagttattttatttgttattattaccattcacaattaacagtcaagaacaaataataataacaaataaaataacttttaagaggacaaggcactagaaataaaaaaggacactaataacatttgtaaaagcttgtactggatgtggttgcccccatttgtgtgtgtggttgtgtg

SEQ ID NO: 2117 - DNA, 544 bp, Homo sapiens
acagcaggaaaaccgaaagcgccatggctctagtcgaagtgtagtagatatggatttagatgatacagatgatggtgatgacaatgcccctttgttttaccaacctgggaaaagaggattttatactccaaggcctggcaagaacacagaagcaaggttgaattgtttcagaaacattggcaggattcttggactatgtctgttacagaatgaactatgtcctatcacattgaatagacatgtaattaaagtattgcttggtagaaaagtcaattggcatgattttgcttttttgatcctgtaatgtatgagagtttgcggcaactaatcctcgcgtctcagagttcagatgctgatgctgttttctcagcaatggatttggcatttgcaattgacctgtgtaaagaagaaggtggaagacaggttgaactcattcctaatggtgtaaatataccagtcactccacagaatgtatatgagtatgtgcggaaatacgcagaacacagaatgttggtagttgcagaacagcccttacatgcaatga

SEQ ID NO: 2118 - DNA, 328 bp, Homo sapiens
cgcgctatgggacagagcccccgatccgccagcaccacctgaggatccagaaaccgccccagcgatggaagaggatcaggagctggagagaaaaatatctggattgaagacctcaatggctgaaggcgagaggaagacagccctggaaatggtccaggcagctggaacagatagacactgtgtgacatttgtattgcacgaggaagaccataccctaggaaattctctacgttacatgatcatgaagaacccggaagtggaattttgtggttacactacgacccatccttcagagagcaaaattaatttacgcattcagactcgaggt

SEQ ID NO: 2119 - DNA, 124 bp, Homo sapiens
acatgagcaggctcagcctaggggaataattgccaacaaacacttttgggaagcctgggaccatggctctgccaggaatctgtgacatctccagggcatcatttgagtcctgccttctcaaagt

SEQ ID NO: 2120 - DNA, 301 bp, Homo sapiens
  misc_feature 249: n = A,T,C or G
tcggcttgttctccaagatcctggatgaagtggagaagagacatcagatctccatggctgtcatctacccgttcatgcagggcctccgagaggcagccttccctgctcctgggaagactgtcactctcaagagcttcatccccgactcaggcactgagttcatttcactgacacggcccctggactcccacctagaacatgtggattttagttctctatcgcactgtctcagttttgaacagatacttnagatctttgcctctgccgtgctggagagaaaaatcatcttcctggcggaagg

SEQ ID NO: 2121 - DNA, 346 bp, Homo sapiens
  misc_feature 288, 308, 332, 340: n = A,T,C or G
actttaattgtgacttgaactcaaggtaaataaattaaataattaataaattaaccttagcttactggacggccaccatcttatatgctgttcccttgactgaaatgttgtggggtaaatgactatatatgaaatgggacttattggaggaattaatgcatctgataatggaggttgagaagttccacaacaggccatctgcacagcagagaccctgaaatgctggaagcaggacttaatccagcccaaaaacctaagacccagggaagccgatggtgtaattcttanttcaaggccaaaatccttanatccttcgggaggccactggtgtntgccctgnagtcca

SEQ ID NO: 2122 - DNA, 379 bp, Homo sapiens
  misc_feature 168, 332, 364, 373: n = A,T,C or G
acctctgctatttgctgttattttatctgctatgctattgaagttttggcaattgactatagtgtgagccaggaatcactggctgttaatctttcaaagtgtcttgaattgtaggtgactattatatttccaagaaatattccttaagatattaactgagaaggctgnggatttaatgtggaaatgatgtttcataagaattctgttgatggaaatacactgttatcttcacttttataagaaataggaaatattttaatgtttcttggggaatatgttagagaatttccttactcttgattgtgggatactatttaattatttcactttanaaagctgagtgtttcacaccttatctatgtanaatatattnacttat

SEQ ID NO: 2123 - DNA, 473 bp, Homo sapiens
atgaaagtctctgccgcccttctgtgcctgctgctcatagcagccaccttcattccccaagggctcgctcagccagatgcaatcaatgccccagtcacctgctgctataacttcaccaataggaagatctcagtgcagaggctcgcgagctatagaagaatcaccagcagcaagtgtcccaaagaagctgtgatcttcaagaccattgtggccaaggagatctgtgctgaccccaagcagaagtgggttcaggattccatggaccacctggacaagcaaacccaaactccgaagacttgaacactcactctacaacccaagaatctgcagctaacttattttcccctagctttccccagacaccctgttttattttattataatgaattttgtttgttgatgtgaaacattatgccttaagtaatgttaattcttatttaagttattgatgttttaagtttatctttcatggt

SEQ ID NO: 2124 - DNA, 309 bp, Homo sapiens
ggcctcacagctgaaggagagactagaaaaagagaagaagttaacaagtgacctggggcgcgccgccacgagactgcaggagcttctgaagacgacccaggagcagctggcaagggagaaggacacggtgaagaagctgcaggaacagctggaaaaggcagaggacggcagcagctcaaaggagggcacctctgtctgagtttcctctttggaaaaagaagttattgttcaacttaccaaaatgccttacacattccttacaaataaaccaaccaacctacacagcgttatccaggcccaacttccggt

SEQ ID NO: 2125 - DNA, 219 bp, Homo sapiens
  misc_feature 46, 58, 84, 87, 97, 127, 163, 168: n = A,T,C or G
acaagcttttttttttttttttttttttttcttttttttttttttnaaaaaaattatntactttattacaaatggtaaactcanagngctccaaatnttttatttacaaacaacactgggcaggatncccaaacaaacaaacaagaaataacttacaaaggcntgaanctgtttatggacagtaatcagctttcatcaaattaaaaaatatatatatgt

SEQ ID NO: 2126 - DNA, 328 bp, Homo sapiens
  misc_feature 167, 323, 324: n = A,T,C or G
ctggtcgtgatggcaaccctgggaacgatggtcccccaggtcgcgatggtcaacccggacacaagggagagcgcggttaccctggcaatattggtcccgttggtgctgcaggtgcacctggtcctcatggccccgtgggtcctgctggcaaacatggaaaccgtggngaaactggtccttctggtcctgttggtcctgctggtgctgttggcccaagaggtcctagtggcccacaaggcattcgtggcgataagggagagcccggtgaaaaggggcccagaggtcttcctggcttaaagggacacaatggattgcaaggtctnnctgg

SEQ ID NO: 2127 - DNA, 205 bp, Homo sapiens
actttgggaggccaaggcaggtggatcatgaggtcaggagatcgagaccaacctggctaacacacggtgaaaccccgtctctactaaaaatacaaaaaattagccaggcgttgtggtgggtgcctgtagtcccagctactccggaggctgaggcaggagaatggcatgaacctgggaggcggagcttgcagtgagccgagatcgt

SEQ ID NO: 2128 - DNA, 246 bp, Homo sapiens
acagggtattaaacaaataccaaggggaacagttaacttcaatacaaggtcaaaatcagcaacaagttctacaatccagtgctgatatcagatacaagcttcaaggacaatttcttttcgaaggcttattccagtttcgtgaggctagcatgaggtgtgtgcatttgccaggggcaaatttctattctcaattaacccatgcagcaaatgctacgcatctgctgagtccgtttagaagcatttgcg

SEQ ID NO: 2129 - DNA, 348 bp, Homo sapiens
acaagaaccaagtgaagagggaaaattgtaagtgctgtgaaacttaaatcctggtgttttttcccattgacaactaaaattgatggtgatcttcatgaccagttgatttctattggttcttctagagtaacattgtgtgtggtcagatcaatacgtaatatcatgttggtagtgtcttcattaaaaggaagcgaatttttatttccgttatacgttagagtaactgcattgacaggagtagttcctttcccccatacatgaagggatccaagcctcgtttcacttttatttatgtaacctctcttcaatatagtgcttgttaaggtggtctggcttaaattaaattgt

SEQ ID NO: 2130 - DNA, 413 bp, Homo sapiens
  misc_feature 380, 381, 405: n = A,T,C or G
accctagaaaatgcaacttccattagtttgatgaatctgacttccacaccactatgcaacctttctgatattcctcctgttggcataaagagcaaagcagttgtggttccatggggaagctgccattttcttgaaaaagccagaattgcacagaaaggaggtgctgaagcaatgttagttgtcaataacagtgtcctatttcctccctcaggtaacagatctgaatttcctgatgtgaaaatactgattgcatttataagctacaaagactttagagatatgaaccagactctaggagataacattactgtgaaaatgtattctccatcgtggcctaactttgattatactatggtggttatttttgtaattgcggtgtnnactgtggcattaggtggatactgnagtggact

SEQ ID NO: 2131 - DNA, 597 bp, Homo sapiens
  misc_feature 541, 562: n = A,T,C or G
acatcccaaataacagctaaattttgattatttatccaatctaagagtctctttcaggctaaaattttagtctctttcttataatcactgatataattaaatttatttttactatgtaaatttgtgttttttttatcatgctcccttgtttctactgggctggcgaagttttctctaaacatcttgaagccactccctactggtctgcagggattatgttgtttatgttcccttagtagttgtataacagttaatattatagtggagaaatctggcagacatcatcttaactaagcaattaaagttgccaccaccagcattgagacaagcagattttaggaccacttgatacaatgcacggaggaggacacaccatctttctatgtcatgactgccaaaaatgcatacattgaatccctaactgcaaggaaaacatcaggcaaaccccaactgagggatatttctgtaagataaaatgctcctactcttccaaaatgtcaagaatgtggaaaacaatgaaaatcggaggatttccacatcnaagtagaatgaatacaacctnatctttggattcgactatgcacatacagtatgcac

SEQ ID NO: 2132 - DNA, 362 bp, Homo sapiens
acgggcaccggcttcccctacagatggtcacccacctgcaagtggatggggatctgcaacttcaatcaatcaacttcatcggaggccagcccctccggccccagggacccccgatgatgccaccttaccctggtcccggacattgccatcaacagctgaacagcctgcccaccatggaaggacccccaaccttcaacccgcctgtgccatatttcgggaggctgcaaggagggctcacagctcgaagaaccatcatcatcaagggctatgtgcctcccacaggcaagagctttgctatcaacttcaaggtgggctcctcaggggacataactctgcacattaatccccgcatgggcaacggt

SEQ ID NO: 2133 - DNA, 510 bp, Homo sapiens
attctggcaacctttgaacagcccagagcttgcaacctagcctcacccaagaagactggaaagagacatatctctcagctttttcaggaggcgtgcctgggaatccaggaactttttgatgctaattagaaggcctggactaaaaatgtccactatggggtgcactctacagtttttgaaatgctaggaggcagaaggggcagagagtaaaaaacatgacctggtagaaggaagagaggcaaaggaaactgggtggggaggatcaattagagaggaggcacctgggatccaccttcttccttaggtcccctcctccatcagcaaaggagcacttctctaatcatgccctcccgaagactggctgggagaaggtttaaaaacaaaaaatccaggagtaagagccttaggtcagtttgaaattggagacaaactgtctggcaaagggtgcgagagggagcttgtgctcaggagtccagccgcccagcctcggggtgtaggtttctgaggtgt

SEQ ID NO: 2134 - DNA, 410 bp, Homo sapiens
accgatcgtagcccctatgagaaggtttctgcaggtaatggtggcagcagcctctcttacacaaacccagcagtggcagccacttctgccaacttgtaggggcacgtcgcccgctgagctgagtggccagccagtgccattccactccactcaggttcttcagggccagagcccctgcaccctgtttgggctggtgagctgggagttcaggtgggctgctcacagcctccttcagaggccccaccaatttctcggacacttctcagtgtgtggaagctcatgtgggcccctgagggctcatgcctgggaagtgttgtggtgggggctcccaggaggactggcccagagagccctgagatagcggggatcctgaactggactgaataaaacgtggtctcccaaaaaagctt

SEQ ID NO: 2135 - DNA, 283 bp, Homo sapiens
  misc_feature 272: n = A,T,C or G
acgccctgatggactggccacaaaatgcactcaaatgcagcagagaactacgagattgtcagcaagcagtgctccagaaattgtttttaagtcatgtctagttttaaatctttggaataaaactgatttttaataccctccaactaacatacatacaattgcctccggcaaatggacagattttgtgtgtgtgtgcgcgtgtgtgttaacgggtgttctttctttttttttcattttgtattattttgttttttttttgtttttgtttttgnttttttttggt

SEQ ID NO: 2136 - DNA, 181 bp, Homo sapiens
gttggagacaagatcacctttgtagatttcctcgcctatgatgtccttgacctccaccgtatatttgagcccaactgcttggacgccttcctaaatctgaaggacttcatctcccgctttgagggcttggagaagatctctgcctacatgaagtccagccgcttcctcccaaaacctctgt

SEQ ID NO: 2137 - DNA, 102 bp, Homo sapiens
actatatctattgcgccaggtttcaatttctatcgcctatactttatttgggtaaatggtttggctaaggttgtctggtagtaaggtggagtgggtttgggg

SEQ ID NO: 2138 - DNA, 491 bp, Homo sapiens
acaggcaggatcttgccaccttgcccaggctggtcttgaactcctgagctcatgccatctgcctgccttagtctcccaaaatgctgggattacaggagtgagccaccatgcccggctggcagttgcatggaagagaacacctctttatggcttaccctctagaatttctaatttatgtgttctgttgaaatttttgtttttttacctttattgaaacaacaaaaagtcagtattgaaacatatcttcctgttttctgttgtcaaatgatgataatgtgccatgatgttttatatatatcattcagaaaaagttttattttttaataacattctattaacattattttgcttgccgctggcatgcctgaggaatgtatttggctttgattacacactaagtttttgtaataaatttgactcattaaaaaccttttttttttaaaaaaaaaaaaaagaaaatctcattagtgaacttatctttgcagctgagt

SEQ ID NO: 2139 - DNA, 259 bp, Homo sapiens
acagaactcagaggaaaaaagaaattaaattttagctttctggagagcagcccctctctggcaccatcaaacacttctttgtttcccttcaacttggaactcttcaaacatcaggggttgtgagggtttggccattcttttatcttgggtccatgtgagtgacagaaatggtgcggcctgggaaagatctccctcctttacattttctcttctccctcctcctccttattctaaaactgtgcctccaacagaggggcag

SEQ ID NO: 2140 - DNA, 145 bp, Homo sapiens
tttttttatctaacaaaggcactttattgcattaccattcacaattaacagtcaagaacaaataataataacaaataaaataacttttaagaggacaaggcattagaaataaaaaaggacactaataacatttgtaaaagcttgt

SEQ ID NO: 2141 - DNA, 345 bp, Homo sapiens
  misc_feature 243, 338: n = A,T,C or G
accacaatctctacatacttatgttaaaaatttccattatttgtttgtcctataagttagaagagagaaattacagcaagtgtttgttaaccacagtaacaaagggcagtgataatttattgagtgatgagatgtgtcggatgctgtgttaagtgctttatctacatgaacttaatccttacaatagtcctgtgaggtgttagcaccaatttgccaaaaaggaaactgaggcacagagaggtngcataacttgatagaggtcacacaactagtaaatggttgggctggatttcaaactcaagtgtctcactctaaaactcatgttcttgaccattctnctgcttt

SEQ ID NO: 2142 - DNA, 322 bp, Homo sapiens
  misc_feature 295: n = A,T,C or G
gcggtggctcacgcctgtaatcccagcactttgggaggccgaggcgggtggatcacgaggtcaggagatcgagaccatcctggctaacaaggtgaaaccccgtctctactaaaaatacaaaaaattagccgggtgtggtggcgggcgcctgtagtcccagctactcgggaggctgaggcaggagaatggcgtgaacccgggaggcggagcttgcagtgagccgagattgcgccactgcagtcccgcctgggccacagagcgagactccgtctcaaaaaaaaaaaaaaaaaaaaangaaaatccaaatttataaattgctggg

SEQ ID NO: 2143 - DNA, 518 bp, Homo sapiens
  misc_feature 34, 67, 75, 108, 123, 162, 241, 258, 325, 336, 345, 490, 499: n = A,T,C or G
acaagctttttttttttttttttttttttttttnggcctttttaagagacttttatttgagtggttnttacaaanattgttgcaatatgaaagtcatttgtttgatanaaatatcaagctgtnttgtcaaacacactgaagtaacccaaaaatatatttcanagctcacagagcttaaaaagagcaaagattatatgcaaccagacaaaacctatttctgcatttcctatttctttctcanactgctttgcctaccanactctcacgtttaaacatcttcaggaaatgcagggatcattttgtttggaattttaagacacaccanaacacatagtntttacaaanaaacttttacagatacattaattgaaaagataccatcaagaaatataattttgaaatctccctttcttgccaattgatcagaatgcaagatgagatgctaaccaaacagccctttagctgtcttgtatttccatacactaaatgngtatttcanaaactgctcaaccatcagc

SEQ ID NO: 2144 - DNA, 113 bp, Homo sapiens
  misc_feature 72, 73: n = A,T,C or G
accttgtcagcatcatcgccatgaagggctttgaggaaagtgaacctgtctcagggtcattcaccacagctnnggatggcccatctggcctggtgacagccaacatcactgac

SEQ ID NO: 2145 - DNA, 150 bp, Homo sapiens
  misc_feature 106, 137: n = A,T,C or G
acatggcggcctgccacagccctgtggtcagccagcttgaggctgggcacttcttcgatgcatccatcaccaagaagcatctctttgcctctgtccatgatgctgncacctttgccctccaacacccgaggcctgtncccaacagccctg

SEQ ID NO: 2146 - DNA, 279 bp, Homo sapiens
acataagttccctatggtttatggagagttatttattaattaactttatggtagggctagtatgaatacctttttaacaattgtgtgctattacaacaatgaagattcaaatgactccgctttgaaggatgttttctctatatggtaaaatatatatgaagaagtcttgattacgtgaagatcacttgactcagaatacttcaatgtattttgttcacattaccactaagcatattatcagtaaactattaactgactgcacattatgtaatacgttgt

SEQ ID NO: 2147 - DNA, 223 bp, Homo sapiens
  misc_feature 31, 67, 77, 87, 117, 161, 176: n = A,T,C or G
ctttttttttttttttttttttttttttttngcttgaattttttgcttttggagaggaatgaatttntattactcanaaacagcagngaaaacagcttaacatttaaattgcaagtntctaatcaaatgataattaggaagggaagtatcctgaaaaacanaattcactaaatcanggtatttcttttattctgcattgccttatgataattcttcaaaaagc

SEQ ID NO: 2148 - DNA, 270 bp, Homo sapiens
actctgtagaaaattatggattttactttaatggtttaaaaaaaggcaaggagagcccttgtcgcttttcttacctaatcacagagtttgtgtagtgaatttaaaaagaaaaaaaaattgttataagtttggagcaagggagtatgtgtttcaaaggaatctccttcctttttttgtgtgtttttccttttgtcccaatggggaacctaaatctgctttaattgcacagacacatggacaaaaagtcattttgtatctgccaagtgtggt

SEQ ID NO: 2149 - DNA, 243 bp, Homo sapiens
  misc_feature 227, 239: n = A,T,C or G
gagagagcgagctgagtggttgtgtggtcgcgtctcggaaaccggtagcgcttgcagcatggctgaccaactgactgaagagcagattgcagaattcaaagaagctttttcactagttgacaaagatggtgatggaactataacaacaaaggaattgggaactgtaatgagatctcttgggcagaatcccacagaagcagagttacaggacatgattaatgaagtanatgctgatggtnatgg

SEQ ID NO: 2150 - DNA, 276 bp, Homo sapiens
acacaggaggcaaagtgtttcacatcatagacttcacttccaactccttggaatgttcatttctttggcttacaggagagactagacaggaaggccaggcaatgcttaggcaactaaaatgaggttgggggtaatgctaacgtcaccctcacagggatggccacggggactgttattcgcaagctggttttctagacctgttagctggaagcatggtgagcaccatttctggacgctcaggccgtgtcgggcttcagtcatctccaccacacaggt

SEQ ID NO: 2151 - DNA, 322 bp, Homo sapiens
actctgctcgactcttggtaacatgaaattctgaatgttactttatcatgattgcactgcaactttttccttaaaataactgcttttgtaagaacggtgatattggagtgattagtataaattcaatggaatttgagaagcaatggcagcgggataatttagagtcactgatattacgagaggggtctttttgtaaacctccttttcaatgtcaaagcaccaatttataaaacgctgcagatgtagaggttatgtgcaactgatctgtccagtttgtgtatgaaatggatttgataaagtttttgctaattatttactacat

SEQ ID NO: 2152 - DNA, 346 bp, Homo sapiens
gcagtatccgggcatcgagatcgagtcgcgcctcgggggcacaggtgcctttgagatagagataaatggacagctggtgttctccaagctggagaatgggggctttccctatgagaaagatctcattgaggccatccgaagagccagtaatggagaaaccctagaaaagatcaccaacagccgtcctccctgcgtcatcctgtgactgcacaggactctgggttcctgctctgttctggggtccaaaccttggtctccctttggtcctgctgggagctccccctgcctctttcccctacttagctccttagcaaagagaccctggcctccactttgccctttgggt

SEQ ID NO: 2153 - DNA, 334 bp, Homo sapiens
  misc_feature 248, 325: n = A,T,C or G
actaaatgcatttcaacttgatagtttcaacttatgataggtttaccaggatgtagtcccactgttgaggagcatctatttaggggttaattactttagtaataagtggaaagtaagataccttgagtaatgtttgcctataaaattgtcagcgtatttttacactattggctcaagaatgttataatgctaagggacataagttggcaaccacttggtttttggaaggactttcggtattgtattanaagtctgccctagctgttaaatttctgggtatttatcctaaggaattaattaaagagttaattgttcctttcttcantgggccatt

SEQ ID NO: 2154 - DNA, 521 bp, Homo sapiens
  misc_feature 478: n = A,T,C or G
acctattattatttcaaatttaaaaacttcttcttttttaagagatagggtatcactatgttgcccaggctgatctcgaactcttggcctcagatgatcctcctgcctcagcctcccacagtgctgggactacaggcatgagccaccacacccatcataaattaaaacttctgaacaatctagtaacaaatggaaatgctttcccatgatccagcacatctagcagggggtgtctgctgacattctacacaaagagacacactggagttgtgcttctcatcatttcacattaagaacccaactgcacctttttctgtgcctctaaacacctgtagtctgataggggacaccccccccaagaccttaatcattcacattaacaccttgagactttttgccatatcagactgaatatagccagtcattttttcccttaaatcaagtcactttttttttttttttaaacaaagtctcattntgttgccctggcatgatctcagctcactgcaacctcctcctcc

SEQ ID NO: 2155 - DNA, 566 bp, Homo sapiens
  misc_feature 531: n = A,T,C or G
gacagtctagagtacatcatcagaacatactaaaatggaagtcctttggattatagttttgtttatggatattacacaatgaatgcttgtctgaacagttcttacttgccagttccactattcttcatcttcaccaccttctactggtcagtctttcatcacttaaaaaaaaaaaaaaaaatcacacatcattgtggtttttttcccccttaattctgtctcttctagccagaagcatctggcttaagcatatttcatcaacttctctgttattccttttaaagatctttatctctgaaattttcccagaagatacaagttttggtaatattatcaataggaattttgagacttgggcattcatctttgtctcaaaaacaaacagaaagccaaccttcaaataaaacaaatttgaaagttttagctcaataatttggggacattttacttaaattacaaaagaacataattatgattttatgatcgatattagtgttaggtttatttccacacttactgtcattaatttgncatttacatatttttatttgctttgtagtttaatc

SEQ ID NO: 2156 - DNA, 292 bp, Homo sapiens
  misc_feature 102, 121, 208, 211, 221: n = A,T,C or G
acaagcttttttttttttttttttttttttttttttggggagcgctgatcctgtttatttggcaggaaaacgagacaatccagcagcccaggagggacaggnggacttaatcctcctcctngtcgtctccagccccagccccaccctggcccttcttggcattcttccttttcacgcggcccgggcggccacccccgtagggagagcncanagagaagtcnatgtgcttctgggaatccaggcggacaatgaaggacgggatgttcaccacctgcttgcggaccctgatatg

SEQ ID NO: 2157 - DNA, 305 bp, Homo sapiens
acgggtggcatacagaaccccacataccatgaaggcgttagaagcagatggtttatactgcttggtataccaagtgtttagcacctgaagtgtggtgtcattgagtttactaatcaccatgttaccagtgctggcttcagttgaataaataacccacaatccattctcatccacagcaaagtcaatatcttgccaagcaacattagcatatgaaaagcggttattataggcagcattagggagagtttgagtcacagcaatcgtgttggtggtcaggttaactctggcaatattcccggtgttgt

SEQ ID NO: 2158 - DNA, 438 bp, Homo sapiens
  misc_feature 78: n = A,T,C or G
tttttttttggcttgactcaggatttaaaaactggaacggtgaaggtgacagcagtcggttggagcgagcatccccanaagttcacaatgtggccgaggactttgattgcacattgttgtttttttaatagtcattccaaatatgagatgcgttgttacaggaagtcccttgccatcctaaaagccaccccacttctctctaaggagaatggcccagtcctctcccaagtccacacaggggaggtgatagcattgctttcgtgtaaattatgtaatgcaaaatttttttaatcttcgccttaatacttttttattttgttttattttgaatgatgagccttcgtgcccccccttcccccttttttgtcccccaacttgagatgtatgaaggcttttggtctccctgggagtgggtggaggcagccagggcttacctgt

SEQ ID NO: 2159 - DNA, 164 bp, Homo sapiens
taacattgaaaggtaaaatctgattatttagcatgagaaaaaaaatccaactctgcttttggtcttgcttctataaatatatagtgtatacttggtgtagactttgcatatatacaaatttgtagtattttcttgttttgatgtctaatctgtatctataatgt

SEQ ID NO: 2160 - DNA, 515 bp, Homo sapiens
  misc_feature 498: n = A,T,C or G
acctctgctatttgctgttattttatctactatgctattgaagttttggcaattgactatagtgtgagccaggaatcactggctgttaatctttcaaagtgtcttgaattgtaggtgactattatatttccaagaaatattccttaagatattaactgagaaggctgtggatttaatgtggaaatgatgtttcataagaattctgttgatggaaatacactgttatcttcacttttataagaaataggaaatattttaatgtttcttggggaatatgttagagaatttccttactcttgattgtgggatactatttaattatttcactttagaaagctgagtgtttcacaccttatctatgtagaatatatttccttattcagaatttctaaaagtttaagttctatgagggctaatatcttatcttcctataattttagacattctttatctttttagtatggcaaactgccatcatttacttttaaactttgattntatatgctatttattaa

SEQ ID NO: 2161 - DNA, 276 bp, Homo sapiens; identical to SEQ ID NO: 2150

SEQ ID NO: 2162 - DNA, 372 bp, Homo sapiens
  misc_feature 61, 77, 83, 85, 116, 123, 129, 139, 162, 190, 192, 220, 238,243, 344, 346: n = A,T,C or G
acaagcttttttttttttttttttttttttttttttttaaataaaagagggaatttattanaaaaatacagaggttnttgcananattccaacagctgcaaggggtcaacagctanaatcacncctttntgaaggacanagtatgctgtaaccacaaacttntaattctgggttctgcaccatcaggaananaatatcctacaggacagttctccttgtntactgcataaaggactanaatgnggattcatttctgcttgctttttgatccttatagtcctttatgctggcctcaaacttgtcaagcacatgttggcagacattcatgagctcattcaggcctntntgaaatggctcaacagctggaagggt

SEQ ID NO: 2163 - DNA, 154 bp, Homo sapiens
ccaaggtggtcttccgggatccgtatcggtttaagaagcggacggagctgttcattgccgccgagggcattcacacgggccagtttgtgtattgcggcaagaaggcccagctcaacattggcaatgtgctccctgtgggcaccatgcctgaggg

SEQ ID NO: 2164 - DNA, 532 bp, Homo sapiens
  misc_feature 54, 62, 68, 70, 83, 93, 109, 182, 185, 192, 198, 203, 223,241, 245, 251, 257, 280, 291, 311, 317, 336, 353, 374, 382,418, 435, 439, 446, 452, 462, 528: n = A,T,C or G
acaagctttttttttttttttttttttttttttttaagtatcacaatgtttatngatagatncaagtntntaaaatcagggcntgaacatganttgataaattaagtanacttaatttcaatactataataggagggaccaattcaaattctcaccatttgtttcacacccacaaaaaccanttnaagggcnttaacnatctntcaaaactgatcagttttgngcaagtaaaccatgtttntttnaaaaanacttgngcacttgcccaggctcaaggatnttaaaatctancacataaagcccattactanaggtanaaatacaggcaatatactnttacggcaacaaccatnaattacagttaaaaatttttntgtaacanccaaatggataatcaaatattgcaacaactcaagtnttactgagcaaagggcntttntacagtnttcagngttgctattnagttttctaacttaaaacagcctatgataactggcagcaaaaaaggtccttgcaataaactgcctntgct

SEQ ID NO: 2165 - DNA, 247 bp, Homo sapiens
  misc_feature 236: n = A,T,C or G
cctcactggagggcattgccccggaagatcaagtcgtgctcctggcaggcgcgcccctggaggatgaggccactctgggccagtgcggggtggaggccctgactaccctggaagtagcaggccgcatgcttggaggtaaagtccatggttccctggcccgtgctggacccgtgagaggtcagactcctaaggtggccaaacaggagaagaagaagaagaagacaggtcgggctaancggcggatgca

SEQ ID NO: 2166 - DNA, 139 bp, Homo sapiens
cgagcagatggctatgtgctagagggcaaagagttggagttctatcttaggaaaatcaaggcccgcaaaggcaaataaatccttgttttgtcttcacccatgtaataaaggtgtttattgttttgttcccgcaaaaaaa

SEQ ID NO: 2167 - DNA, 201 bp, Homo sapiens
tctaaacgtttggatctttttctcagcaggtatcagttgtaaataatgaattaggagccaaaatgcaaaacgaaaaatgaagcagctacatgtagttagtaatttctagtttgaactgtaattgaatattgtggcttcatatgtattattttatattgtacttttttcattattgatggtttggactttaatacgagaaat

SEQ ID NO: 2168 - DNA, 215 bp, Homo sapiens
  misc_feature 33, 160, 162, 194: n = A,T,C or G
acaagcttttttttttttttttttttttttttnggattcttaatttctattttatatttttaaaacatgatattagtatataagataatatagctagccagtgttagtaaagaagtcatgattgagtcttaaaaaagaacaatccagtgttgcagttcananaggttagcatgtcagggcgcaggcctcggccnaggtgtgctttgcatttagga

SEQ ID NO: 2169 - DNA, 292 bp, Homo sapiens
  misc_feature 33, 61, 72, 85, 125, 129, 144, 171, 172, 189, 212, 227, 251,261, 263: n = A,T,C or G
acaagcttttttttttttttttttttttttttngaaaagtcatggaggccatggggttggnttgaaaccagntttggggggttcnattccttccttttttgtctaaattttatgtatacgggttnttcnaatgtgtggtagggnggggggcatccatatagtcactccccnntttatggagggttcttntactattaggacttttcgcttcnaagcgaaggcttttnaaatcatgaaaattattaatattnctgctgttananaaatgaatgagcctacagatgataggatg

SEQ ID NO: 2170 - DNA, 475 bp, Homo sapiens
  misc_feature 453, 454, 455: n = A,T,C or G
tgttttttaaaaaaataggatcattctgaactttggaatgacccccttatatattttctgaaaatgaaaacagttacatgaaaaaaatttccaatgaagatgtcagcattttatgaaaaaccagaagttattagatgaaagcagcgagtgaatctttaaaacagacttgatcacgcacacacaataagtctttctctccgaaaccggaagtaaatctatatctgttagaaataatgtagccaaaagaatgtaaatttgaggatttttttgccaatagtttatagaaaatatatgaaccaaagtgatttgagtttgtaaaaatgtaaaatagtatgaacaaaatttgcactctaccagatttgaacatctagtgaggttcacattcatactaagttttcaacattgtgttctttttgcattcattttttacttttattaaaggttcaaaacccnnnaaaaaaaaaaaaaaaaaaaa

SEQ ID NO: 2171 - DNA, 150 bp, Homo sapiens
  misc_feature 75, 76: n = A,T,C or G
ctaccatgagccctacaaacaactaacctgccactaatagttatgtcatccctcttattaatcatcatcctagcnntaagtctggcctatgagtgactacaaaaaggattagactgaaccaaaaaaaaaaaaaaaaaaaaaaaaaaagct

SEQ ID NO: 2172 - DNA, 180 bp, Homo sapiens
acatttccccgggagaactcgtccattcggtggtggcggccgttattggtggtgaagacccgtagcaacagtgggcatgtcttctcgcggtcgatcggtttctctggctccttcttaatttcctcctgggtaacgcgcgactccaccgccatcttcctcctacggcctgcgagacgctcg

SEQ ID NO: 2173 - DNA, 270 bp, Homo sapiens
  misc_feature 233, 247, 261: n = A,T,C or G
ctgctattctccgagcttcgcaatgccgcctaaggacgacaagaagaagaaggacgctggaaagtcggccaagaaagacaaagacccagtgaacaaatccgggggcaaggccaaaaagaagaagtggtccaaaggcaaagttcgggacaagctcaataacttagtcttgtttgacaaagctacctatgataaactctgtaaggaagttcccaactataaacttataaccccanctgtggtctctganagactgaagattcnaggctccct

SEQ ID NO: 2174 - DNA, 171 bp, Homo sapiens
acagaactaaattttttaactttatttgctgttaaattctgtgaagtttcagttatctaaaataaatatacacaaatatgaaatataatgtttcagattgcaaggtaatatgtaatagtagtgtttgtaagatactcttgtctaatattaactagtagtattttgatttgt

SEQ ID NO: 2175 - DNA, 349 bp, Homo sapiens
  misc_feature 313, 314: n = A,T,C or G
acaagaaccaagtgaagagggaaaattgtaagtgctgtaaaacttaaatcctggtgttttttcccattgacaactaaaattgatggtgatcttcatgaccagttgatttctattggttcttctagagtaacattgtgtgtggtcagatcaatacgtaatatcatgttggtagtgtcttcattaaaaggaagcgaatttttatttccgttatacgttagagtaactgcattgacaggagtagttcctttcccccatacatgaagggatccaagcctcgtttcacttttatttatgtaacctctcttcaatatanntgcttgttaaggtggtctggcttaaattaaattgt

SEQ ID NO: 2176 - DNA, 445 bp, Homo sapiens
ggtaataaaacgaatgataaaatgttgttctttgctgaattgccacacacaggtggccattttatgtcagttcctcagagaaattgactacaaaacagcgtttaaatctctgcaagaacaaaacagtcatgatgctatggactcctactacgactacatatgggatgttaccattttggaatacttgacttatcttcatcataaaagaggagaaacagataaaagacaaattgcaatcaaagccatcggccagacagagttgaatgcaagcaatccagaagaagtgttacagctggcagcgcagagaaggaaaaaaaagtttctccaagcaatggcaaaactttacttttaagcagttaaatttttttaacttttattttttaaacaatgggctaaaaataaacagtattaaaaggttaagtttatataacaaaaaaaaaaaaaa

SEQ ID NO: 2177 - DNA, 381 bp, Homo sapiens
  misc_feature 348: n = A,T,C or G
actatgaatagcttcttgctttatgactttaggattaacttgtaaaaaacatatcctgaactgagatatgcaaaatactcattttcaagttatggaaatgtgtttgtggcatataggactgtggggtctgtgtgtgtagtgagagtgtgtagccactattataactggaatttaatttacattcataaactactatatttcccatcttgcaaatcattttatgtctcatctgtttttcctttcggttatatctttggttttgaataccaacatttaaaatgatggtattttatcttttaaacttaaaaattatttaatacagctatatggaccttataaaattgattncttatttattattagacattactactaaaaggt

SEQ ID NO: 2178 - DNA, 354 bp, Homo sapiens
  misc_feature 31, 108, 185, 249: n = A,T,C or G
acaagcttttttttttttttttttttttttngagtatgtaaaattctctattttttcttgttttgtttttacatataaaaaacagaatagcaatgtctattttatcanaatcacatatatacataaacatatatatatatatatacacacaaatacaagttgccaaatatatatatagtatgtanatgtatattgaaaccttatttcaaaggaatgtgtgctggggagccaggggatcggggagggcanagctgagtgttagcaaaattaaatatctgttcaagataagctagtgactgtcaccgatcagggagagagagattggaaacatgaattttatatacaaaaaccggt

SEQ ID NO: 2179 - DNA, 341 bp, Homo sapiens
  misc_feature 100, 119, 208, 230, 255, 301: n = A,T,C or G
acaagctttttttttttttttttttttttttttttgcgggtgaggtaaaatggctgagtgaagcattggactgtaaatctaaagacaggggttaggcctntttttaccagctccgaggngattttcatattgaattgcaaattcgaagaagcagcttcaaacctgccggggcttctcccgccttttttcccggcggcgggagaagtanattgaagccagttgattagggngcttagctgttaactaagtgtttgngggtttaagtcccattggtttagtaagggcttagcttaattaaagnggctgatttgcgttcagttgatgcaaagtggggttttgca

SEQ ID NO: 2180 - DNA, 624 bp, Homo sapiens
  misc_feature 528, 529, 546: n = A,T,C or G
acttaatctgttacagcctttgttaacagtcgccatctttataacatgtagggttaacttactgtgtcttaatctatttaacacattctgaaatatcaatgtttaagtcaaagcttttatacatgggtccacttatttcaagttctctgtccaagcaatagcttcctatctttgaaacatcttaagtagctattaatacaatctaggtcaactagtttaagatatattttctactctattgctcatctttttaactttcctccactcaagtatttattgtgtaaacgtgcattgataaccagatgttatatgactgaatgctaaaaatttcctgttaaacaaaatcagttttatcaaatattaaatccacaatattttccttggcttaaactgagtattcgctttctatttttccataatcattgcaatcttgccaataactgcatcacttaagctttctttttcacaactgcaggcagattctaaactctgacatatatttacgttaaacacacaaagtagacaacnnaaatttcaagtaaaatnaaactgtatccacatctattagaccaaacaggtctcaacatctagattttacttctataaattacacaaatacattgt

SEQ ID NO: 2181 - DNA, 363 bp, Homo sapiens
aaagaagttgattccttcattcacttcgccattcattcatacttccgtccatccattcagaaagcatttattaagaatttactcaggcatgatggcccatacttgtaatcccagctattgggaaggatgagatgggaggatggcttgaggccagaggtttgagaccgaccagccagggcaacacagtgagaccccttctcaaaaaaaaaaaaaaaaaaagagaaagggagtgtgtgattagaagctaaataggaaagttttgagcttcaagtcagtgaggagtaaaaaagatttttaaaaagcaaagaaaacaaaatataagggaaaaatatgagaaaaataaaaataaaaagagaataatag

SEQ ID NO: 2182 - DNA, 581 bp, Homo sapiens
  misc_feature 543: n = A,T,C or G
gccaatgcaaattgcctattggaatcttcttcctatattttacaaacatcagtggctgaaatagctcagagtaagagctcagcctggtttgaatttaatcatctctttagatcttataaggccagcattaggaaacttgttcacttttcattttcaaaggagcctagttgaagtgctattatgagtgtgggctatggaaagacagcttttcctacactgataaagaaaaaaaatgaggaaattatttcatccccttgtgacatctgtgactttttggatttaataatcttgctgtttttcctctttatgacaaagaatataattgggaggatgaagtgtcttaaaaattgtagagaccagctcactggaatgtttttccatccctgtattcatggcttgactttgtgactgctctacactgcatgtctgacattgcagagtgagctatgttgaggtaaactggttggttgtcattattttgcaatcagcctggtctctcccatgaagatgtcgtgtgcataagcacaatcatcactgattagnagatcacagcagaatacccttggattagagagaagttc

SEQ ID NO: 2183 - DNA, 119 bp, Homo sapiens
  misc_feature 53: n = A,T,C or G
caagctttttttttttttttttttttttatctgtttttgcttctgtttttcanattcttcttcttcatctgaactgctttctgctttcttggttttattcttaggaactttctttggtg

SEQ ID NO: 2184 - DNA, 567 bp, Homo sapiens
actaaattaacagtaagtagttaacacagagaactaaaatttaaccgcattatatcactgtatatatttctcatgatttttgctaattagagcatttacttaaccagtaataaactacacacacacacacacacacacacgtatacgtgtgtgtgtatatacttggctctgacacaactctggtgcttaattaggatatgttctattatgtattttgaatgtttatcctgctagtgtgatgaacttttgttggaaaagcagaattagaaggaacagtttttcaatcagtttcatttggtaattacaggaaaaccttgagttgctctaatttaatttttccaattaatacatttagactttaaattgcatccgtaattctcttggctgaaaaacagtggtattttaagacagttttgttatacatgtgacttacttttgactcagcctgagaggaggaaatgtaaagagataagagatttggcccaaagcagcaagagactagtaaccttgagccaggacgaagccaagacaacgtgactcccaagtagcaggagcagaggtcggtca

SEQ ID NO: 2185 - DNA, 354 bp, Homo sapiens
acagtgaagatctctcaagaatgatttgtgtgatgtagttcggtggatcatccagcagagggcagtagagccagagccatagtaaaagttatagtaaagttgctcttagcaacttgagtcttacttagatttaattttgcatagaaccaaaagttcagtttcgtagccattttctttaaagtcaggctgtagtggttccgaaatgaaaattaggccctgattttatgtaagatgatgtccaatctttaattgacaccttaaaaatattaaaagattatgataggatcaggaaggagtttttgaaaatgcaatttgtagtttttaacaagtgatgtagaataaataaaaagaagt

SEQ ID NO: 2186 - DNA, 156 bp, Homo sapiens
caccaaggaggcggccgctggcccaggagagaacacggggaggtttgtttgtgtgaaaggaaagtagtccaggctgtccctgaaactgagtctgtggacactgtggaaagctttgaacaattgtgttttcgtcacaggagtctttgtaatgcttgt

SEQ ID NO: 2187 - DNA, 530 bp, Homo sapiens
  misc_feature 108, 131, 213, 275, 304, 355, 371, 379, 386, 440, 446, 479,519: n = A,T,C or G
acaagctttttttttttttttttttttttttttttgaaaagtcatggaggccatggggttggcttgaaaccagctttggggggttcgattccttccttttttgtctanattttatgtatacgggttcttcnaatgtgtggtagggtggggggcatccatatagttactccaggtttatggagggttcttctactattaggacttttcgcttcnaagcgaaggcttctcaaatcatgaaaattattaatattactgctgttagagaaatgaatgancctacagatgataggatgtttcatgtggngtatgcatcggggtagtccgggtaacgtcggggcattccggataggccganaaagtgttgtgggaanaaagttanatttacnccgatgaatatgatagtgaaatggattttggcgtaggtttggtctagggtgtancctganaataggggaaatcagtgaatgaagcctcctatnatggcaaatacagctcctattgataggacatagtggaagngggctacaacg

SEQ ID NO: 2188 - DNA, 512 bp, Homo sapiens
actccagcctgggcgacagagcaagactccacctcaaaaaagaaatatttagcaaatattaaaggacaagagggaatatctgtttaaaaaattataatgcacgttagatgaaaagtaataggatgagatggttgttgctgaaatagcacttgctatataaattcaaacattccttttcaaattcagcttctcagaggtttgacttcagatgcttgagcactttcaacattatctttgcctttatccttctttatgcggataaacacaactgctaaaattataccaatcaccagaagggtggtcagcagtataccaactgccatgcccacagtgggtatcccagtctggtgacctgctggccggaaacaacttccttccacacaactgcagaatgtaactggtaaagaaacaatgccttccaagggtggccgacccccatcattgatgcggatcaagacgacatactccctctcctcaaactctgtgtgcctggtagacagtcgggcatgagt

SEQ ID NO: 2189 - DNA, 386 bp, Homo sapiens
  misc_feature 88: n = A,T,C or G
agcggctttgaagaagaaaggatgggaggtggtggagtcggacctctatgccatgaacttcaatcccatcatttccagaaaggacatnacaggtaaactgaaggaccctgcgaactttcagtatcctgccgagtctgttctggcttataaagaaggccatctgagcccagatattgtggctgaacaaaagaagctggaagccgcagaccttgtgatattccagttccccctgcagtggtttggagtccctgccattctgaaaggctggtttgagcgagtgttcataggagagtttgcttacacttacgctgccatgtatgacaaaggacccttccggagtaagaaggcagtgctttccatcaccactggtggcagtggctccatgc

SEQ ID NO: 2190 - DNA, 333 bp, Homo sapiens
  misc_feature 134, 192, 249, 264, 303, 312, 315: n = A,T,C or G
acaagcttttttttttttttttttttttttttttttcctgaaatagctttttattaaacggcaaagcaaaactgcaacacaatttaaatgtctgtaaattaggtcacaaaagggatgcaaaatgtttgcagttngactattatatattcacacagctaaagtcattcatcaacttttacaccaatacataanattattccatgattaaaagcccaaatctaataaccttaagctacattaggggatctnttttcatattataanattttagcaatacttccaatattgatttccttaccaaanggaatctanaanctaaatttttaaaaattg

SEQ ID NO: 2191 - DNA, 225 bp, Homo sapiens
actggaaaacctccatcttggctcccagagctctaggaactcttcatcacaactagatttgcctcttctaagtgtctatgagcttgcaccatatttaataaattgggaatgggtttggggtattaatgcaatgtgtggtggttgtattggagcagggggaattgataaaggagagtggttgctgttaatattatcttatctattgggtggtatgtgaaatattgt

SEQ ID NO: 2192 - DNA, 555 bp, Homo sapiens
  misc_feature 490, 521, 527, 542: n = A,T,C or G
acctgtaatcccacgtaactcagtaagctaatgcacgagaatctctacctccccagctcaagcaatccttccacctcagccccctagtagctgggaccacaggcatgcagtgccacacctggctaatttttaagtgtttttgtagagacagggtttctctatgttccccagcataatcttgaactcctgggctatgtccaacctgttatcaaatttctgattgtctttttccccctttgaggtgtttctttgatttgtcccttcttctgttgtcttctaacagcccattattacctcaaaccattcttactgtattggccttctgactgggccttctactaggttgacccaggagtttttattatattatccctaggctgtaattgagagttgcgaagagtgagctaacagtaaatataacataatagaagcatatgatactctaattactaagtgaagaaaatcatgtaaagtaaaagtatgatacagntttatatgtgtatatttacataatgcacagnatacanacttttatatttttnaagattatatatg

SEQ ID NO: 2193 - DNA, 393 bp, Homo sapiens
accaaatgccgaattctagactgaggagtagagttcattggagtcttaaactctctgatatcacttaaagctggagtttattttaaaacaaatgaagcatgggccacctcatgatgcagtggctcctctctggttgaggagagggaaaattggaaaaactggtcgagtaattatcaataattttttttaaaaagaggatcccaaactgtaaaagattgaaataatctttctcaggattttttaaatgtctaagattatgatgtcatatctcccacttaccttataagtaaaaaggttaatatcaagtaacttattagctcttaaagtaaaattgaacttattaaaagctatctatgatttaatagatttaataaaattccttcacgacctggt

SEQ ID NO: 2194 - DNA, 307 bp, Homo sapiens
  misc_feature 34, 36, 105, 184, 296: n = A,T,C or G
acaagctttttttttttttttttttttttttttngnaataaaattgctttattatttttagttactacaaatatatattataatatttactaaggaaaaaatcanaactcataacaataagaacttaaaaaatacccacaatcttatataccaaaaggtaaatgctctatatttaaatacaggngtttttcatgaagatggtatgcaataattcttatgagagcattttgtgatatgtaaagtgcatgcagtccagtgtccaaggggtcatggttgtaaacagcgggtcgagggcnctgtccatggt

SEQ ID NO: 2195 - DNA, 436 bp, Homo sapiens
  misc_feature 191, 207, 238, 248, 250, 271, 273, 293, 302, 332, 356, 388,412: n = A,T,C or G
acaagctttttttttttttttttttttttttttttctttctttctttctttctttctttctttctttctttctttctttctttctttctttctttctttcttctttctttctctctctctctccctctttctttctttctttctttctttctttctttctttctttcaaggaggcaggaaagcaattaagnggtcacctcaacatangggggacatgatccattctgtaagcagttgngagggggtananatgggacaaaattttggtctnanaggtcttaccatcttaattnggtaacttntaatgaaaaaaataaaaaatagaaataacnttatccaaagatatcttaaagctnaaaacttgaacagcacattttttgtttttgtngttggtttggctaactcctcctgnaatcacctttctggtttagctagt

SEQ ID NO: 2196 - DNA, 202 bp, Homo sapiens
  misc_feature 169: n = A,T,C or G
actatgtgtaactttggcaacaggttgcagtcagccagggtgagctcgttgccatccaaaaacttcctctgagagacaccttcatcttcagcactggtttcatccacttcttctgggaggggggatgttaagtaattgtctaaaaccttcagggctttcaggagtcccntctccagattgtcattgagtgctgcctttgaat

SEQ ID NO: 2197 - DNA, 474 bp, Homo sapiens
gtaccatcagaggaaataaatcttagtattcggtgtgatagagactaattcatttcttttgatgaagtcccactctttgagtgactttgaagggggagacaaaatgtcaagaaggagtcctgcaggaacaagtgcttaaggtggtgtttaatacagcagggagccaagatacagtagtaggacacagtaaagaatgtggagtgtgtagatacaataaagaattcattttatgatctgccacctgttacttgaaagaggagtaagttagggaaataaatgactcagttcttcatacatgcaaaggtaagttagttattacaaaagtttttgctgttgtttgtgctgaaagaaaagcatatgcatttaaacattttttaaaaaataaatcactcaataggcttaagaaaaatactttagttcatagttcattgatctgacgttttgatttaagatcaggggatgaatccaggatga

SEQ ID NO: 2198 - DNA, 562 bp, Homo sapiens
  misc_feature 473, 474, 558: n = A,T,C or G
acgtgtgcgtaacacccgaaccaggaatctcagctatgaccttttcacttagctacgctaaatgtcagtccaagataaaagaggagattaaagataaaactgaagattaaagagactgtgagtagtgacacattcaagtgaggctgtaaatctaggtaagtgacactaagaacctgaagagaccctatgaacttttccctaggaggccgtttccaactgccctatgacaaacagctgatcatcacgtttataatgatggttcactcacggagcttcgaacttattcatacctacatttaattgatcaccacgaatgggtaggcagacgtgtcagaccttcaggggactctccttccccacagcccccaaaccttctatacaaagtccccctgctttaagtcaaaaggtcaattctggattaaaacttgtccgcactaagtttataggaggtaacatgcaaataatgtgataanngttaaaatgacttgtcaatagcaaacattataaatgtatgctactatctcattaagtagaggacctggagaaaccataaaggtnacaa

SEQ ID NO: 2199 - DNA, 552 bp, Homo sapiens
  misc_feature 456, 457: n = A,T,C or G
acattctaggcagtataaacacaccccataatgcaagtaataggtaatctagagatgtggactttattgctatatgggaattacatttaaatttgagggcattttatataaagaaaaatacagacctataaagtttggcatattcattaagttatcttttaatatttttttctagaaaacaggtgacatttgtatctacgataaaaatttttatacagaacctactgcctcaaactgaatcccatcaagaaaactagtttctattgtattagtaactcaaaataaattatcacttcgaaaacttgctttcccacactaaggtaagttcagactagattgaacactccagaattttttactacagactgtttttaagttagaagtgatggcaattttataaatagagaatatacttccactgatgcccttactgtgccaaaacaaaaatcttaagannagcaagtagacaccttcataactatgaatgaagctgctgaagtagtgtttaggatcctccatggcagttagtgaatgtaagaagtacctgcccgg

SEQ ID NO: 2200 - DNA, 495 bp, Homo sapiens
actgtaattctttcattgaggggctatgcgatggagacagactaactcattttgttatttgcattaaaattattttgggtctctgttcaaatgagtttggagaatgcttgacttgttggtctgtgtgaatgtgtatatatatatacctgaatacaggaacatcggagacctattcactcccacacactctgctatagtttgcgtgcttttgtggacacccctcatgaacaggctggcgctctaggacgctctgtgttcactgatgatgaagaaacctagaactccaagcctgtttgtaaacacactaaacacagtggcctagatagaaactgtatcgtagtttaaaatctgcctcgcgggatgttactaaactcgctaatagtttaaaggttacttacaatagagcaagttggacaattttgtggtgttggggaaatgttagggcaaggcctagaggttcattttgaatcttggtttgtgactttagggtagtta

SEQ ID NO: 2201 - DNA, 178 bp, Homo sapiens
gctaaggagctgatactttgacagtgtttttagacctgtgttactaaaaaaaagatgaatgtcctgaaaagggtgttgggagggtggttcaacaaagaaacaaagatgttatggtgtttagatttatggttgttaaaaatgtcatctcaagtcaagtcactggtctgttcgcatttga

SEQ ID NO: 2202 - DNA, 306 bp, Homo sapiens
  misc_feature 215, 250, 254, 256, 287: n = A,T,C or G
tcaacacatggacatcactggagaggaaaacccactcaacaagctccgcgtgaagattgaaccaggcgttgacccggacgacacctataatgagaccccctacgagaaaggtttctgctttgtctcatacctggcccacttggtgggtgatcaggatcagtttggcagttttctcaaggcctatgtgcatgaattcaaattccgaagcatcttanccgatgactttctggacttctacttggaatatttncctnancttaagaaaaagagagtggatatcattccangttttgagtttgatcgatg

SEQ ID NO: 2203 - DNA, 287 bp, Homo sapiens
  misc_feature 120: n = A,T,C or G
ttttttgactctagagggggtagagggggtgctatagggtaaatacgggccctatttcaaagatttttaggggaattaattctaggacgatgggcatgaaactgtggtttgctccacagngttcagagcattgaccgtagtatacccccggtcgtgtagcggtgaaagtggtttggtttagacgtccgggaattgcatctgtttttaagcctaatgtggggacagctcatgagtgcaagacgtcttgtgatgtaattattatacgaatgggggcttcaatcgggagt

SEQ ID NO: 2204 - DNA, 362 bp, Homo sapiens
  misc_feature 323, 357: n = A,T,C or G
acttcgtgttagtgtgtccagagtaagttttcagaagagttagcaattgaattgacttagcccgtctgattgcagtgctattgcattaggataaaatggatagaagtttaaataggattaagtctacgaaatgatttcaaagtcttgtcagaataacgttttatggacttaagttcaatgacttaatcttcgtaataatgaaatgaaaaagttcccgttatttagtgaagaatgttgcattgaattagagatttgcggtttatctgtgcccttgggaaaaaatttgcccaccttgtttctttaaattatcgtctcaatgtctnccttttaaaattccacgacttttgaaatatccgngatta

SEQ ID NO: 2205 - DNA, 503 bp, Homo sapiens
  misc_feature 38, 60, 89, 147, 156, 180, 184, 192, 202, 240, 248, 254,261, 275, 278, 283, 300, 306, 320, 346, 384, 433, 441, 446,460: n = A,T,C or G
acaagcttttttttttttttttttttttttttttttcnagtttaatttttaatttattanaacccagtaaatgatgattttaaaagcanagtttccatcaaattaacacttaattcagggcaaaaatacatttaaaaaacctaaatnttaaggcanaagtaaaacattataaaaacagtntgtntaatacanactgtaaaangtcaaatttttaagagattcacatagtattttatagcnctaaaatnttaatncagtcanaaatattatcaatnggnccaanatttctgtttataaaangtctanactgctaattgaanaaatgttgctgtataagtaatagctncaatacaaccaaccaagtgattgtttttatgacaaaanaactaaggcaggtaattgcatggtttccatttgtaaagcttttgcagtnttaaaatntaaancattactaggggtnttttttgattcatctccctaccctaatgcccccgaaatgtacc

SEQ ID NO: 2206 - DNA, 215 bp, Homo sapiens
  misc_feature 153, 157: n = A,T,C or G
actttaaaacttccttttaagaaaaccatacattttatttcagagtaaacaacccatcaaaaacaaatacataggtatatgggctattgtttttcagtattttagagcacaccatccaacttaaaatgtggtccactaaaatatgtaaatatncctnctatcacaaaaataaattaaacctcatggttaaaaaaaacagaaacgtttggcgtacg

SEQ ID NO: 2207 - DNA, 479 bp, Homo sapiens
acaatggtgtcgactactgagcttcagaagacaactggaactatgatccacaagctggcagcccgagctctaatcagagattatgaagatggcattcttcacgaaaatgaaaccagtcatgagatgaaaaaacaaaccttgaaatctctgattattaaactcagtaaagaaaactctctcataacacaatttacaagctttgtggcagttgagaaaagggatgagaatgagtcaccttttcctgatattccaaaagtttctgaacttattgccaaagaagatgtagacttcctgccctacatgagctggcagggggaaccccaagaagccgtcaggaaccagtctcttttagcatcctctgagtggccagaattacgtttatccaaacgaaaacataggaaaattccattttccaaaagaaaaatggaattatctcagccagaagtttctgaagattttgaagaggatgccttaggtgt

SEQ ID NO: 2208 - DNA, 385 bp, Homo sapiens
  misc_feature 361: n = A,T,C or G
ctagtagggaatcttagaaacacaaggacacaaagaacatgcatggaccatttgagggatggtgaagaaatcaccccaactggaataaatgtgttgggtagtgggagatgaatctaggaaggtggtttggagttatattttgaaggatcttgttgggtgaagtaaggatccatggacttgctctttggagcaggagagagtaattaaaatattttaagcagcagaatgatgtcatcagattcagtcacttagagagataattttgataatatcaatgtaagaagataccttgaagagggacagatggaaaaaagatgagacaaattagaagcccattgctatcttcggtaaaaaagattangcctaggatagtggaaatgggaag

SEQ ID NO: 2209 - DNA, 178 bp, Homo sapiens
  misc_feature 156, 175: n = A,T,C or G
acacccccaaatttttgttttactggacagaaaaatcatggtagtatttttccttagtctcctaagacaggtgagctttcattttctgtcagccaagatgtcacttttctgatatccaaaatgtcacttttctatattcaatgtaaactttaattncttgtcattttcttctcanaac

SEQ ID NO: 2210 - DNA, 564 bp, Homo sapiens
  misc_feature 481, 482, 541: n = A,T,C or G
ttttttttttttaaattttcactctaccaagtctcaggcgctgattaggactttataaataatgaagtcaaactaatattttttcagttaaatagtagattaccttggtgcaaagcaggtaacatttctatcccatggctgccatttaaatctctagaaaagtgatctgggaaagcatagtaattgatacctttgctagctgttttaagttttcagtattataaacatgaatggatattgacttatttttaggaaacgtaaatattttcaccacgatcgattagactgggatgaacacagttctgccggcagatatgtttcaagacgctgtaaacctctgaaggaatttatgctttctcaagatgttgaacatgagcgtctctttgacctcattcagaaaatgttggagtatgatccagccaaaagaattactctcagagaagccttaaagcatcctttctttgaccttctgaagaaaagnntatagatctgtaattggacagctctctcgaagagatcttacagactgtatcagtctaanttttaaattttaagttattttgt

SEQ ID NO: 2211 - DNA, 404 bp, Homo sapiens
accggtcaaaaaggccaaaagcccaacaccgagcccatcaccgccaagaaattcagatcaggaaggaggtggaaagaaaaagaagaaaaagaaggacaagaaacacaaaaaggataagaagcacaagaagcacaaaaaacacaagaaggaaaaggctgtggctgcagctgctgcagctgctgtgacccctgcagccattgcagctgccacaaccacattagcacaggaagagccagtggcagcgccagagccgaagaaggagactgaaagtgaagctgaagataaccttgatgatttagaaaagcacctgcgtgaaaaggccctgagatcaatgaggaaggcccaagtgtccccacagtcttagggggaaatgtttgttatgatgtaaattttatttggtttgt

SEQ ID NO: 2212 - DNA, 424 bp, Homo sapiens
  misc_feature 352: n = A,T,C or G
acaagcttttttttttttttttttttttttttttgcgatggagtcttgctctgtcaccaggctggagtgcagtggcgtgatctcggctcactgcaacctctgcttcctgggttcaagcaattctccagcctcagcctcccaagtagctggcactacaggtgtgtgccaccacacctagctaatttttgtatttttagtaaagatggggtttcaccatgttggtcaggctggtcttgaacccctgacctcgtgatccacctgcctcagcctcccaaagtgctgggattacaggcgtgagacatcgtgcccggccagtaagttgtttctttatctgccatcctgtaaactcaanaatttctgttagttactggtttctttaactctttggggcatgatttcacatgagcatatttaaatgctgatg

SEQ ID NO: 2213 - DNA, 246 bp, Homo sapiens
  misc_feature 181, 202, 232, 242: n = A,T,C or G
accatagccaggcctcagggttgatgggttcacccactgtgcctaacacctgcaaggatgcccggctatgcttggtgacaggctcatctccaaacttcatgagcagacggatggctgtgggtgctgtgtagaacttggtcaccttgtatttgtccacaatgctccacaggcggttcacgtncggatatgtgggaatcccctnaaacaaaacactggtggcaccattggccantggcccatangtga

SEQ ID NO: 2214 - DNA, 503 bp, Homo sapiens
acatggtgcgacctttcatgcaccctgggaacctggcattgaacgctttctcaaaatcctcctctgacatccagcgaccgagctggctgaggcctgttttggggatgggcactgtgtctctttgctcttgggtgacgataaccgtcttgctttcgatcctggccacatccctggggtcagtgagagccaaccagcagttgtcatacttcttcagccgcctgaggatgccctcttcctccatctggcccagaagccgcccattctcctcctcagagccgtcacagatgtggatgtgatcaggctgacacagctcagcgttattctcgagaaactccctcactgcctggggcaggctgtccaggcttccctggacaactttggccgagaggttcaggccgttttgcagctgaggaggcatttctgcagagtgctgctaaggggcacgaatgtgaggtcacctttcttctctttggatgatctcgaagggagatccacaggtttct

SEQ ID NO: 2215 - DNA, 132 bp, Homo sapiens
  misc_feature 60, 104, 124: n = A,T,C or G
ctaatggccacatcatctaactgtgggatctatttcatttctggaaataacacaacttanttctagggctttcatgcacatgaaatataaaacagcttagttgntctgaaaacatgacaatggntaatttta

SEQ ID NO: 2216 - DNA, 149 bp, Homo sapiens
acctctacttcagcaattacctacagattgatgaggaagaatatggtggcacgtgggagctcacgaaggaagggtttatgacctcttttgccttgttcatggtcatttggatcatcttttacactgccatccattatgactgatggtgt

SEQ ID NO: 2217 - DNA, 293 bp, Homo sapiens
acctgcaggccagagggttttgcttctaggagaacaaacaggcttgtggggtgagaaccccaggggataggggccattttgatccctattctccagacagggaggatcacagagattaagctgctggcccaaggtcatggggtaggaggtggcaaagccaggatttgaatccagattgctccttcctccgcaggagcagaatttttccaagcagagaatgaggggaaaggtgttctagacacaggcaggcacatgccaggtgctggaaaaagaagagagaaaggtgagccagg

SEQ ID NO: 2218 - DNA, 213 bp, Homo sapiens
actacgatcattttgggggcctatatagatcttacatcaaaattcagaggaattagtcagataacactattttagttataaattgagaaggtggcatttgaagagaatatttggcacatcctccactacgtaagctaccctatgcctcaaaattactaaatcattggtataaagttttggtttttttcctgatagtttaaagattagtaaagt

SEQ ID NO: 2219 - DNA, 443 bp, Homo sapiens
acttctatatattgcatgatgcccacccagggttaggttaacagttgttgatccaattatgaaagaaataaaaagaactctttaaaataatgaagtaaaatagctaattttcccgttggtttaccatatgctgtatttaaaagttttaaaaattatactaactatataactaaacatatttatgtttattatatataatatgacatgcaattatataagacatactattatgtttatatataatgcttaattaagcaattatatttaaatataagttatactttccttccccagataagacaaagaacctgtttacttctctgagggatttattggttcctgtgaaatctgtgaaggccacaaacactccatagccagagaatgacaacatacgattttcttttcagtcttgtagtatccacagtagtgatgtctgtccatgt

SEQ ID NO: 2220 - DNA, 502 bp, Homo sapiens
attaaattgtcttcctcgattctccatcgggtgtagagtttttaaactatcaatggcatttcaagtcttctgaaacagcatggctgtatgtgcgtggtccatagcacagtactggatttatgcaaatgtcttttctgcgtcttttgagatgagtatcaggttttttttccttttatcatctgatgatgaacttaatgtttccatttgtattaatggaatactaagtccctctgtgatttctgaaccaagctattcctaggcctgagttttattttgttgacacagaaataaattagaaggccaagcgtggtggcatgtgcctgtagtcctagttgctgaggtaagaggattgcttgagcccaggagttcaaggctgcagcaagctttgattgcgccactgcactccagccttggcgacagactaagacgctgtctcaaaaaaaaacaaaaacgacaaaaaaaaacaaaacagaaaaaataaactaaggcaatgacagtccct

SEQ ID NO: 2221 - DNA, 519 bp, Homo sapiens
  misc_feature 264, 499: n = A,T,C or G
acacaaaccatcggaggagagagtaagagaaataattatcaatgctgttcggatagaacaggagttcctcactgaggccttgcctgtgaagctcattgggatgaattgcactctaatgaagcaatacattgagtttgtggcagacagacttatgctggaactgggttttagcaaggttttcagagtagagaacccatttgactttatggagaatatttcactggaaggaaagactaacttctttgagaagagagtaggcaagtntcagaggatgggagtgatgtcaagtccaacagagaattcttttaccttggatgctgacttctaaatgaactgaagatgtgcccttacttggctgattttttttttccatctcataagaaaaatcagctgaagtgttaccaactaaccacaccatgaattgtccgtaatgttcattaacagcatctttaaaactgtgtagctacctcacaaccagtcctgtctgtttatagtgctngtagtatcaccttttgccag

SEQ ID NO: 2222 - DNA, 348 bp, Homo sapiens
acattgattagttagggtggggcgggaacaaatcacaatggtggaatgtcatcagttaaggctatgtttacttcttttgtggatcttcagttacttcaggccacgtggatgtatacgtgcaagtcacaggggatgcgatggcttggcttgggctcagaggcctgacattcctgccttcttatattaataagaaaaataaaacaaaatagtgttgaagtcttggggcggtgaaaatttgtgggggttggtgtggagagagaatgggcgatgtttctcagggctgcttcgagcgggattaggggtggcgtgggaacctagagtgggagagattaagctgaaggaagattt

SEQ ID NO: 2223 - DNA, 524 bp, Homo sapiens
acttaaaagctagaatatctgtcacattaatttcaagcttattttccaccagtgtaataatccttttcattttagacattaaaagaaaccaagaaggcctagaagagctgttatattaatataataagttaaatgattcttaacctctaatgcaataaatgttaaacatgtatgaataaactagaactggagattgcccatctcctggcttcttagtaagaagtgtctgttctagttttgatcagctaaataagtttgactcattttttagtttttagtgtggttgtaaaatggagttaggaaataaaaacacctcaaataaagagacttcttaaatgcatagccacgttaactgtgacaaggaagcccataatctgcttaaggtcacagcaaatttcaatacattttgcagctgtcccccaaaagggattaaaacttgttcttaccttaaataatttaatcacctgaattatgtgctttattgcttatttgaaatatggcagtaaattagaaagtagatgctt

SEQ ID NO: 2224 - DNA, 437 bp, Homo sapiens
actgtagtgccttcttatcttgtagagctattgtgaggatcagcaccaatgtccgtagaggccctgacacaattccctaagctgatatttgatagagccttccataactgattgctaaattgtcttcataatttttcagtagcttctttcaataggaaacatttctttgctactataggaatttgcagcaccatcaacagatgcccctgataaaggatacgttgattccggtctggacctcctggagaagaggcccaagtggctagccaattcattgcagatgtcattgaaaattcacagataattcagaaagaggacttatgcatttctccaggaaagcttgtctgggttctatactgtgatctcatttgcctcgactacgatggaaacattttggatgcctgcacatttgctttgctagcggctttaaaaaatgt

SEQ ID NO: 2225 - DNA, 476 bp, Homo sapiens
  misc_feature 461: n = A,T,C or G
gagaagactacctagccagtgaagtgcagaggatagacataggaaaacattccaggcatttggagacagctgaaagtatccatgctgactttcatgatttagaagtctttaactgaattattaaaattgccttttttttgtgctgtacaatgtctactgtactgtgggtcatttagatgagatgaaaaacttaattaaatctgaagtgtcagaggcgcttagtaagccttagtaaagttgtgattgaagaaacttaatacaaatgaactagaggtttgtaatcatgccactcactaacgattttatttctgtagcagaatcattttttctatgtaaggtgttaatgtgtgtgtatgtgctttggttgtaggaaaacttgaaaattccaaaatccttattttcctatttgagaggctggttcagcagggtgtgtgtgtgtgtgtgtgtgtgtatgaatggtntatttattacattat

SEQ ID NO: 2226 - DNA, 231 bp, Homo sapiens
actacagcaaaacaattaacatttcccttccaagtaaatgcatccaacaaatatttcttgtgttcccaccatatataagacattactgggatttcaaagttcagtgagagacagatataccaatatagcttctacccttggctccccagtccccaaaccaaacattcacagacttccaattattcttatcccaaaggcataaagctacaattaaagcatctactttctaat

SEQ ID NO: 2227 - DNA, 549 bp, Homo sapiens
  misc_feature 232: n = A,T,C or G
acaaccaccatgacaactgccgggagggccacgcaggtcgtggtcacctgccagcgactgtctcagactgggcagggaggctttggcatgacttaagaggaagggcagtcttgggcccgctatgcaggtcctggcaaacctggctgccctgtctccatccctgtccctcagggtagcaccatggcaggactgggggaactggagtgtccttgctgtatccctgttgtgaggntccttccaggggctggcactgaagcaagggtgctggggccccatggccttcagccctggttgagcaactgggctgtagggcagggccacttcctgaggtcaggtcttggtaggtgcctgcatctgtctgccttctggctgacaatcctggaaatctgttctccagaatccaggccaaaaagttcacagtcaaatggggaggggtattcttcatgcaggagaccccaggccctggaggctgcaacatacctcaatcctgtcccaggccggatcctcctgaagcccttttcgcagcactgctatcctccaaagccattg

SEQ ID NO: 2228 - DNA, 173 bp, Homo sapiens
  misc_feature 95, 145: n = A,T,C or G
acagccagctcaccatgcagaaggccttcctggagaagcagcaaagtgggtcggagctggaagaactcatgaacaagtttcattccatgaatcanaggaggggggaggacagctaggcccagctgccttgggctggggcctgcgnaggggaagcccacccacaatgcatggag

SEQ ID NO: 2229 - DNA, 228 bp, Homo sapiens
  misc_feature 200, 217: n = A,T,C or G
actacaaattaatgaatgcagggtgttaggagacaatgtctctttttataaggattataggagtagtttccttattccaaggttcagatcgggacaaatgttaacaatctaaaataaatctatgtcacttttgtcatttggactgcagtaatgatatgagtaacattacgttaatggtttgatcactcttcactctgctnattcatgcccctgattntggcttgaaac

SEQ ID NO: 2230 - DNA, 599 bp, Homo sapiens
  misc_feature 587: n = A,T,C or G
acctcatcggcattgctgccatcgtggtcgctgtgatcatgatcttcgagatgatcctgagcatggtgctgtgctgtggcatccggaacagctccgtgtacctaaggcccacagttttttagaagcccacaaaaatgttttaattttttttagcctcataagaaaaaactgaacttctaaacaaaatgttttaatctaaaatattaatacattcatttcatacagatacaattgtaaaatatcacttttaattttgtatggaagaaggggtctaagatggcaaaactatctagggcccacaagaatcataatgcagctctgaatacagggtcaaacaaactgtaactgaagcaatgtaacttgaactggaaactgaagataatttaaaaggattagagaagaatggtcaaggctaaaataatggagatggagagtctgagcttactgatcctgttccactggtttttcttttcttgaatgttactttggaattagattaagtctaatactggggaagcgctagtgtcgatttccattagccaagccagaaaaaaaaaaaaattaggtcattattttatagtcattgngcaataacaaag

SEQ ID NO: 2231 - DNA, 340 bp, Homo sapiens
actttctatgagaagcgtatggccacagaagttgctgctgacgctctgggtgaagaatggaagggttatgtggtccgaatcagtggtgggaacgacaaacaaggtttccccatgaagcagggtgtcttgacccatggccgtgtccgcctgctactgagtaaggggcattcctgttacagaccaaggagaactggagaaagaaagagaaaatcagttcgtggttgcattgtggatgcaaatctgagcgttctcaacttggttattgtaaaaaaaggagagaaggatattcctggactgactgatactacagtgcctcgccgcctgggccccaaaagagcta

SEQ ID NO: 2232 - DNA, 458 bp, Homo sapiens
acctaaatattttatcaatttgaaacacaaattcataaattgtcattattctcagaggcaacaaagcatagaaataaatatttaagttttttctttcttttcttcttcaatctgtgttttaaggctcagagcagacattaagaaatatcaaacaattttttataaaaagtttttcaaatgtttggcccaaagtgaagttgttctgttgatgttatttaaatattcctctcatcttctcagccacaacttcaaagacgtgttcatgccagtcattcatccaaaataaatttcaattcaatgaaaagtaaataacttagggatctataaatgacactgcaatgtatcttgttccatttttaacaggaagtccttcatgcaaatgtgtgagtctcccaggatgcatgaagctccagccttttcgtggtgactcaatagagcaattgtaccttagaaatttg

SEQ ID NO: 2233 - DNA, 427 bp, Homo sapiens
acaagagctgatgtaaaacggtaatcaaggttccaggcatcatgggattagggtaactgaagaataaacccagccaggctgcaacagcaggcaggatgtgctgacttgatgaggtgctaaggccatcgaatgctcggaggaagccggattcacggtgatcatctcaacctgagaaatcgttccttggggtgatttctgcccttttttttgttttgtaagaaagagattccttcattcagtaacttagttttcccttaataaatatttcaaaaataaaaccaatcatcatcaaacaaacaggagccacttttgtaggtaaggtaaatcacaggataatgtattgggataactctgtttttttaaaataaaaaagccttacatggtcagggattgatggagtgggggatgacaaatgcacatttcagac

SEQ ID NO: 2234 - DNA, 457 bp, Homo sapiens
gggccattagccagatttgtctttttgttgtaaaacaaaatttgactaattttacatgtttataaatcttacgctctcactgtttgtttttatttaaattacaattttatctgtttcctgacattgtctcctatatatttctattattaattgcaaaaacatagaaatggaaattttgctatcaacaataaaatttttttaaagtagtgagtgctattttggagttccaaattttcagtaggaagtatctaaaactttttttaatacgtgccattatctatagaaaacattacttcaggttgtgagattgagttgcatttctggatggactgatgaatttatccgacatgaagaagattggcatattagctttaaaaatttttaaagattggattttttttagtataagcactttctaaggattatagagaaatgtttcacctccaatgcatagcaa

SEQ ID NO: 2235 - DNA, 239 bp, Homo sapiens
actccagcctgggcgacagagcaagactccacctcaaaaaagaaatatttagcaaatattaaaggacaagagggaatatctgtttaaaaaattataatgcacgttagatgaaaagtaataggatgagatggttgttgctgaaatagcacttgctatataaattcaaacattccttttcaaattcagcttctcagaggtttgacttcagatgcttgagcactttcaacattatctttgcc

SEQ ID NO: 2236 - DNA, 481 bp, Homo sapiens
acatattgaccaatggcctctgaaaaagcacattttagatactgaaattgaaggaaagaaaatgcatcttcaaacattttttggaatctcaccacatatactttgttagatttgtgtattgtagggtgtttgttttgtatttttgtattgtatatgaactttttttaaatgtgacagttaaacacatctttaaaagcatagtcacagacaaaagcatacagtataaaaatttccttgaaaactcctacaatattatatttggaggcagcttcagactgttttattggtggtagctgcttgctgaggtcttttagttggtaataactccagagaagcagcctgtgtatattcctaacactttgttcactagcatttaagtttagaataagcccaagtaagacaatggaaatgtatatagaactcttagttcttacatgatttaattatatcgatacatgaatttaacttactttaatgtagg

SEQ ID NO: 2237 - DNA, 276 bp, Homo sapiens
  misc_feature 255, 267: n = A,T,C or G
tgaccaccctgaccccagtgtccgagagcagcaaggtcgtcgtggtggagagtgtcatgtgacaactcagctcacatcaccagctcacctctggtagccatagcagcccctgcttcagccccaccgcacccctccagggggcctgcctttccctgacacttttggggtctgcctgggggaggaggggagaaagcaccatgagtgctcactaaaacaactttttccatttttaataaaacgccaaaaatatcaganaaaaaaaaaaanaaaaaaaaa

SEQ ID NO: 2238 - DNA, 78 bp, Homo sapiens
  misc_feature 75: n = A,T,C or G
acaagctttttttttttttttttttttttttttttttctttttttttttttttttttttttttttttaaagcaanatg

SEQ ID NO: 2239 - DNA, 474 bp, Homo sapiens
acatgtgtgccttggggtgctctgcactccacggcccttctcagccacacttcccaccccagggggtgcccccaggctgatctcatttctgatgttgagggctgtttggctctgtctgtatagcttgtaacaggagccttgggctaggggctggggaaggaaagccgagctggcattcgttctctggactttttatgcctgccatacccgctaatgctcctcgaggtgcaggagcaggttgctgagccagtggctgccccgtgccctccttcccagcactatcatgtgtcacgtttcccggactctgcccctacatctcagctgaatctccagggaggctgcagagcatcgtggagaccactttctgcctcggcctttaaatgctgactcacctcctctcggaggaggcgtcctgtcttcacgggggggtcctggtggcctccagacgtagccatttcctgacatcaagatgtt

SEQ ID NO: 2240 - DNA, 405 bp, Homo sapiens
  misc_feature 7, 10, 36, 42, 46, 62, 76, 116, 127, 197, 256, 281, 314,359, 360, 387, 395: n = A,T,C or G
aacagtngtngatccaattatgaaagaaataaaaanaacgtntttnaaataatgaagtaaantagctaattttccngttggtttaccatatgctgtatttaaaagttttaaaaatnatactaactanataactaaacatatttatgtttattatatataatatgacatgcaattatataagacatactattatgttnatatataatgcttaattaagcaattatatttaaatataagttatactttccttccccanataagacaaagaacctgtttacttntctgagggatttattggttcctgtgaaatctgngaaggccacaaacactccatagccagagaatgacaacatacgatnntcttttcagtcttgtagtatccacagnagtgatgnctgtccatgt

SEQ ID NO: 2241 - DNA, 347 bp, Homo sapiens
  misc_feature 61, 71, 95, 103, 146, 180, 282: n = A,T,C or G
aagcttttttttttttttttttttttttcttttttttttttaaatttacaaggggatttanagggttctgngggcaaatttaaagttgaactaanattctatnttggacaaccagctatcaccaggctcggtaggtttgtcgcctntacctataaatcttcccactattttgctacatanacgggtgtgctcttttagctgttcttaggtagctcgtctggtttcgggggtcttagctttggctctccttgcaaagttatttctagttaattcattatgcanaaggtataggggttagtccttgctatattatgcttggttataatttttcatctttcccttgcggt

SEQ ID NO: 2242 - DNA, 172 bp, Homo sapiens
acaaataataaatataaggaacagagaagggggtttgaatgtgatacttgtgtcatgctgactttttttttttggtcagtaaatttctaagtgatgaagaaaacttgaaactgtttgggaaatgcaacaatccaaatggccatgggcacaattataaagttgtggtgacagt

SEQ ID NO: 2243 - DNA, 206 bp, Homo sapiens
  misc_feature 170: n = A,T,C or G
acacattatatggtcaacttacaggaagcacttggataaactggtggctatgtagcctgttgttattatttattgcctagaaaccactcttaaccctaaatgattatctttgcagatccacagtgatcgatcaaaagagggactgaatgggagtgggtgaatggatcggngcaaatccattaccactgctggagaaaccaccctgg

SEQ ID NO: 2244 - DNA, 398 bp, Homo sapiens
acgttcaaggcaggcgaacttcatcatggtgtatggtatctgtctcatccagagaggagcaacccccttgtagaatgcttttaggccttcttccttatacattttgggagctgcatccctcaaagtgttggcataacctggctgggtttgaattcgaaccttagcagcttccataggagccagggcaatgtcagcaaagaattcagcactggcagaggcagccaaatatagtgatgtgcgccagagataagtattctcctctccaagcatattgctatacaagactttaaagacttcataaaagccaaacttgcagagtccctgcatggagtagccaaggaaagtcggagcccatcctttagccaaaccacgaacaccatcctctttaagtgtaactg

SEQ ID NO: 2245 - DNA, 345 bp, Homo sapiens
  misc_feature 339: n = A,T,C or G
acatcataaaaaagtgctttcctgtggcctcagctgggaggccctggcgctggggctaaggggcccaaggcaccatccaaaggctgggaggaaagaacccaaacccaggccctcctcctgccctccagcctttgacaggcaactcatttggcatgatctgttttggtgtgtttaaaacatacatttgcatgtgtctagtgtaaagcaacaagtttgaggaaataagtggaaggagagaggaagttccagttagatggttccactagtgtctactggtaattggtaaaactatgagtgttgctaacctgggctgagggcacctctgcctgtgcaggcagntgacca

SEQ ID NO: 2246 - DNA, 367 bp, Homo sapiens
acagagtcttttgcttcctcccacccctagggggaaaaactgctttgtgctttgggaagttgtctctgaaacccggggacagaggacgcaggacagactaggagggagccgggaggatgggctgcagctgtggaggagggtttcagaggagagaggtcggagagcagaggcctgagaagccagaggcaggtggagagagggtggaaagtgagcagcgggctgggctggagccgcacacgctctcctcccatgttaaatagcacctttagaaaaattcacaagtccccatccacaaaaaaaaaaaaaaagaaagaaaaatatcaaggaataaaaatagactttgaacaaaaaggaacatttgctggcc

SEQ ID NO: 2247 - DNA, 361 bp, Homo sapiens
accgttgcccatgcggggattaatgtgcagagctatgtcccctgaggagcccaccttgaagttgatagcaaagctcttgcctgtgggaggcacatagcccttgatgatgatggttcttcgagctgtgagccctccttgcagcctcccgaaatatggcacaggcgggttgaaggttgggggtccttccatggtgggcaggctgttcagctgttgatggcaatgtccgggaccagggtaaggtggcatcatcgggggtccctggggccggaggggctggcctccgatgaagttgattgattgaagttgcagatccccatccacttgcaggtgggtgaccatctgtaggggaagccggtgcccg

SEQ ID NO: 2248 - DNA, 190 bp, Homo sapiens
gcgccgctccggctgcaccgcgctcgctccgagtttcaggctcgtgctgagctagcgccgtcgtcgtctcccttcagtcgccatcatgattatctaccgggacctcatcagccacgatgagatgttctccgacatctacaagatccgggagatcgcggacgggttgtgcctggaggtggaggggaagatg

SEQ ID NO: 2249 - DNA, 233 bp, Homo sapiens
  misc_feature 134, 200, 213: n = A,T,C or G
acctcttttttcattaagaatcctgcctggaagtttaggccaaagaggctgcttggagcaaaatacagtggtgtctcatcccaaatattctccaggcgtttcttccatccttccaggatttgaattcgggcgtntgctggagtgtgcccaatgctatatgtcagttgagattctaagacttggaagccacagaaatgcanaatgccactgtgnattggccagagaatgacatt

SEQ ID NO: 2250 - DNA, 521 bp, Homo sapiens
  misc_feature 56, 67, 74, 141, 272, 338, 394, 458, 510: n = A,T,C or G
acaagcttttttttttttttttttttttttttttttgcagggaaactgaagaattnttttatttagngggaaanaagtaggtaaatgacagacagctcatattctgttaaacagaaaaaaaaagaatacaaacatcacagngatgaattttcacaaagctaacagatttgaactacagagcaatggaatatttataagcaagatgtcatggtattaatgaccaaattgcatctaactgggttttctaagctcaaaaacatttaaaatctcanacttaaaatttaaatctagacatgacaattgtaagcataccactcagtcatttaaaactattcagngagtgctactcttcctgcataaatattttttttctaacattattttttctcccaanatttaaaatgtcacatctcatgttcctactagtaatcacacacaggattaaaagcccaaccaanaaagtattctttttataatatgttcttaaaagaagaaagaaaaattaaatgngaacattttgt

SEQ ID NO: 2251 - DNA, 131 bp, Homo sapiens
  misc_feature 95, 112: n = A,T,C or G
accaaagacacttattattctaacatgcatcaagtaaagtaaaacaaggagagaggctgcggtgtgtgggtaggggatgcaggagaagctgtgtnaggtagtggacagctgngtggctctggggatgagac

SEQ ID NO: 2252 - DNA, 104 bp, Homo sapiens
  misc_feature 72, 75, 95: n = A,T,C or G
actgtgccaaatatcttcctgatatcatcaaagatcagaaggcctacaaggaaggcaagctacagaaggctntanaagatgccttcttggctatngacgccaaa

SEQ ID NO: 2253 - DNA, 182 bp, Homo sapiens
  misc_feature 70, 91, 124, 155: n = A,T,C or G
acttcagttggtgcacaaaatactgtcatttgctcaaagctggctgccaaatgtttggtgatgaaggcanaaatgaatggctcaaaacttngggagaagagcaaaacctgaaggggccctccanaacaatgatgggctttatgatcctgactgcnatgagagcgggctctttaaggccaagc

SEQ ID NO: 2254 - DNA, 262 bp, Homo sapiens
  misc_feature 240, 249: n = A,T,C or G
agcagcctctgatctgtgcagggtattaacgtgtcagggctgagtgttctgggatttctctagaggctggcaagaaccagttgttttgtcttgcgggtctgtcagggttggaaagtccaagccgtaggacccagtttcctttcttagctgatgtctttggccagaacaccgtgggctattacttgctttgagttggaagcggtttgcatttacgcctgtaaatgtattcattcttaattnatgtaaggntttttttgcacct

SEQ ID NO: 2255 - DNA, 244 bp, Homo sapiens
actcatagaagggatttccatttaccaccaccttgtagtgctcagccaggactatgaagaccagctcaaaggcggcaccctttttgaagggcatgctcctcttcctctcctcgctgccccacttcccgccctgcaacgtgttgaagaccaccttgtcccagccgtcaaaccgcggattgaagtggaaggcgacgtctgagcccggatcctgcccaaccacaaagttcacgaagaaccgcttcat

SEQ ID NO: 2256 - DNA, 497 bp, Homo sapiens
gggagtggaaggtggtggctgctgctccgcagtgtggggaagatggcgccgccggtggcagagagggggctaaagagcgtcgtgtggcagaagataaaagcaacagtgcttgatgactgcaagaaagaaggcgaatggaagataatgcttttagatgaatttaccactaagcttttggcatcgtgttgcaaaatgacagatcttctagaagaaggtattactgttgtagagaatatttataagaaccgtgaacctgtcagacaaatgaaagctctttatttcatcactccgacatcaaagtctgtagattgtttcttacatgattttgcaagtaaatcggagaacaagtataaagcagcatatatttacttcactgacttttgccctgataatctctttaacaaaattaaggcttcttgctccaagtcaataagaagatgtaaagaaataaatatttccttcattccacatgaatctcaggtgtatactcttgatgt

SEQ ID NO: 2257 - DNA, 483 bp, Homo sapiens
gctgacgctctgggtgaagaatggaagggttatgtggtccgaatcagtggtgggaacgacaaacaaggtttccccatgaagcagggtgtcttgacccatggccgtgtccgcctgctactgagtaaggggcattcctgttacagaccaaggagaactggagaaagaaagagaaaatcagttcgtggttgcattgtggatgcaaatctgagcgttctcaacttggttattgtaaaaaaaggagagaaggatattcctggactgactgatactacagtgcctcgccgcctgggccccaaaagagctagcagaatccgcaaacttttcaatctctctaaagaagatgatgtccgccagtatgttgtaagaaagcccttaaataaagaaggtaagaaacctaggaccaaagcacccaagattcagcgtcttgttactccacgtgtcctgcagcacaaacggcggcgtattgctctgaagaagcagcgt

SEQ ID NO: 2258 - DNA, 334 bp, Homo sapiens
acctcgggtcctcagaccaaccagcccaaggaacatctcatgaatttcaaattggatcttcttgacttagcagctgaagactgatgctgcccgattgccttggaagcccccctagaccatcacagatgccgagcttcgggaactctcacagtggaggaagacaggaatgtcaggcctctgagcccaagctaagccatcatatcccctgtgacctgcacgtatacatccagacggcctgaagcaactgaagatccacaaaaaaaatgaaaatagccttaactgatgacattccaccattgtgatttgtttctgccccaccctaactgatcaatgt

SEQ ID NO: 2259 - DNA, 276 bp, Homo sapiens
  misc_feature 82, 253, 256: n = A,T,C or G
ctccccccgagcgccgctccggctgcaccgcgctcgctccgagtttcaggctcgtgctaagctagcgccgtcgtcgtctccnttcagtcgccatcatgattatctaccgggacctcatcagccacgatgagatgttctccgacatctacaagatccgggagatcgcggacgggttgtgcctggaggtggaggggaagatggtcagtaggacagaaggtaacattgatgactcgctcattggtggaaatgcctncgntgaaggccccgagggcgaag

SEQ ID NO: 2260 - DNA, 501 bp, Homo sapiens
  misc_feature 493: n = A,T,C or G
acattaactgcatttttaaaaatcagaataataggtagaaggaaggatacagaaagcacatttggggatagattttaatgaaattttccatatggttctgcattaatttagaatacattacaataaacagagcaaatgcaattatgtatttatattaattatttcaaataatgtttaagaacctttttttaaaaaacaataaaataccctcttcaaaacaccactaactagaaagtcaaactagatcattatctgcctcaaaaatattcgtaggttcttattttttcccttgtgctctcaagatgctgaattcaacaggtaaatactgcacttttccccacacacaattaccttataaataaacaacaaaaatactggttctaccaagactacaatgcttctatgtaatctaaagaggcaaaaaaagttattcttttttttaaaaaaaagcaaaaaagacatacaacacatatttatagatctacatgtgcancaaccacc

SEQ ID NO: 2261 - DNA, 273 bp, Homo sapiens
  misc_feature 196, 264, 267: n = A,T,C or G
actacggaatatctcgaaaaactgcactagagacaaagacgtgatgttaatatcttttccccacaattattacggataaacagtagcaccaataaataaatgataacaaatattaaaattaaaaaaggagagagatttagtatgtagaattctctattttttcttgttttgtttttacatataaaaaacagaatancaatgtctattttatcagaatcacatatatacataaacatatatatatatatatacacacaaatacanggngccaaa

SEQ ID NO: 2262 - DNA, 200 bp, Homo sapiens
  misc_feature 176, 192: n = A,T,C or G
ctaacttcataatagcaattattgcccgaagctatagtggcatatttacaaaagttcttattactgggcggactgataacatttaaaaaataattgtgtttgaccccaaatgactttatacccaattctacataaaaatatagaagatctatctttttttgttaccttcagatgtncactaaataactcagnttttaagc

SEQ ID NO: 2263 - DNA, 298 bp, Homo sapiens
  misc_feature 272, 293: n = A,T,C or G
acgaaggtcagggtaggagtcagactgaggagaacctggattgtagcaggagtagctccagagagtcgctcttccgtaaaatgagatgttgaccttccagggtgtccccttctgcagatctaacagtggctttctgtcgtctcccagcttcccgtggaggatgacattgacctcagtgatgtggagcttgatgacttagggaaagatgagttgtgagagccacaacagaggcttcagaccattttcttttcttgggagccagtggatttttncagcagggaagggacattctntacac

SEQ ID NO: 2264 - DNA, 281 bp, Homo sapiens
  misc_feature 159, 195, 220, 259: n = A,T,C or G
acaagctttttttttttttttttttttttttttttgattttgaatgtatttttaaatttattttttcaaaataatgacattagtaaaaattttacatagcctgtattgaattcacacattcaaatgaggctttaccagtaatgatggggattaatacanagctagtgtttggcatttgactttatctcaaatganctaactgctcaatgaattacagaanactcatactctttttattttttcctggaaattaaaaaanaaaagctttactaaatattgac

SEQ ID NO: 2265 - DNA, 273 bp, Homo sapiens
actattgacccagcgatgggggcttcgacatggactttagggagtcataagtggagtccgtaaagaggtatctttactataaaagctattgtgtaagctagtcatattaagttgttggctcaggagtttgatagttcttgggcagtgagagtgagtagtagaatgtttagtgagcctagggtgttgtgagtgtaaatcagtgcgatgagtaggggaagggagcctactagggtgtagaataggaagtatgtgcctgcgttcacccgatgaggc

SEQ ID NO: 2266 - DNA, 490 bp, Homo sapiens
  misc_feature 41, 59, 124, 145, 195, 241, 243, 258, 280, 294, 319, 359,375, 378, 384, 397, 407, 441, 445, 470: n = A,T,C or G
tttttttttttttttttttttttttttttttattcacaaanaaaaagctccagtccatnttttaatttttttgaaaaattcctgacattacagagctaaactgaaatgtattaatattccactnttacatttccatgacaaacanaaaaattcatgagccaaaaaaaaaaccaaaaaaaaaaaaaaaccaggganaagcttataaaactaaatatggatctcagcatcaacagctgaacananaaaggaattaaaacnctttaattaaaaaatcacgagnggatgataaagggngtaaaaactgaaaatttacaaactntttaaaacctggaatcgctgactgttcaaaaactacacanatggatcatgggtggnggngaacancaaaaggggattntggatgaatntgcattgttctagctgctccccatgccacccgtntccnaggaaagcctgacattgattaaatnttgagccaggctaatgctgg

SEQ ID NO: 2267 - DNA, 630 bp, Homo sapiens
accaaggattttctattgcagcagaccatgctacgagtgaaggatcctaagaagtcactggatttttatactagagttcttggaatgacgctaatccaaaaatgtgattttcccattatgaagttttcactctacttcttggcttatgaggataaaaatgacatccctaaagaaaaagatgaaaaaatagcctgggcgctctccagaaaagctacacttgagctgacacacaattggggcactgaagatgatgagacccagagttaccacaatggcaattcagaccctcgaggtttcggtcatattggaattgctgttcctgatgtatacagtgcttgtaaaaggtttgaagaactgggagtcaaatttgtgaagaaacctgatgatggtaaaatgaaaggcctggcatttattcaagatcctgatggctactggattgaaattttgaatcctaacaaaatggcaaccttaatgtagtgctgtgagaattctcctttgagatttcagaagaaaggaaacaatgtgattcaagatatttacataccagaagcatctaggactgatggatcactgtcccgattcaaattattcttcagtccatttccccttcctatttcagctgttcctttt

SEQ ID NO: 2268 - DNA, 287 bp, Homo sapiens
acaggtagaagcttgattgctaggcccaggcccacccagaccctccaatcctaacaggtatttaggcttgaggttcactccctcctcagctgcacacgcagccaggtattaacgaggatcagagctgttctgaggggtgggaaggagcagccccgccaccactcactcaccctcagtcacatcggggagggggcaccagttacatttacatcacattatttataaaataagaattacatttcatataacatggccagaaggagctctagtcccccaggaaagctgcc

SEQ ID NO: 2269 - DNA, 437 bp, Homo sapiens
  misc_feature 433: n = A,T,C or G
gcccgttacagcagccagttagccaacctccagtcgctgttgagctctctggaggcccaactgatgcagattcggagtaacatggaacgccagaacaacgaataccatatccttcttgacataaagactcgacttgaacaggaaattgctacttaccgccgccttctggaaggagaagacgtaaaaactacagaatatcagttaagcaccctggaagagagagatataaagaaaaccaggaagattaagacagtcgtgcaagaagtagtggatggcaaggtcgtgtcatctgaagtcaaagaggtggaagaaaatatctaaatagctaccagaaggagatgctgctgaggttttgaaagaaatttggctataatcttatctttgctccctgcaagaaatcaggcataagaaagcactattaatactctgcagngatt

SEQ ID NO: 2270 - DNA, 182 bp, Homo sapiens
  misc_feature 165, 171, 180, 181: n = A,T,C or G
acacagaaagatattctggagaaaaggcacagagtgagccaaggcacaaggtaaaatgtttgactggttagagacgctagattattttgtgtggctaagacaaaacaaagctggtggggagtggcaggaggtaagtctagaatggcacaatggggccagactgcnaatgancaaacaagnnt

SEQ ID NO: 2271 - DNA, 569 bp, Homo sapiens
  misc_feature 471: n = A,T,C or G
acaatggtatgatcatagctaactgcaagcttgaacacccgggctcaagtgatcctttcacctcagcctcccaagtagctgtaactacaggcatgcaccactgcactcaattactttttttttgttttagtagagacatggtctcactatgttgcccaggctggtcttgaactcctgggctcaagatcctccagcctcagcctcccaaagtgttgagattataggcatgagccactgcgcccaacctgaacaaaattctattgtgctactctatgccgggtgcaggaaacacagaaataaataaaacagcacagtccctgcccttgtggagcttacagtctagtggcaggttctgaaaagatgcttggcacaataaataataccattacagctctgcaatctgcatgggagttctgagaacgaattcctccagagctacccacctttgaactttgttcccacacattaagnagtcttagctacaaaataaaattgcttcagtgtttgaatgtggacaatcctctgaaagaacacactaggtcagggcaatctatggaccaggtgtagtt

SEQ ID NO: 2272 - DNA, 200 bp, Homo sapiens
  misc_feature 153, 174: n = A,T,C or G
ctgattgaaactgaaatcgacataggagatactatgtctgtaagggagaggtttagtggccgaaggttagtgttattccacatccacgaagtcaagtattcttggctcttctttctccctctgcccccatttaagacaatgtcactcaccctncccttgtagtatcctgctcanccaagatctgcctaagattatgattc

SEQ ID NO: 2273 - DNA, 386 bp, Homo sapiens
  misc_feature 360, 373, 374, 379: n = A,T,C or G
ctgatattagtttaaggatttaataaaatataagtagattgttcttaattgaaatattttatatatacttaattcttttcgaagggtgaaactttattttaagtttttttaaatataagattaaataaataacacattttagcaaattatgtgctgccatgaaagataagggaattcatggtaacttgtatttaaaattctgtaactttgggttgggtaaagatatacttaaaataaagcattccctttgtaattctaatgcattctcaacatatgggtattaaataacatgaaaaaaagtttatataaatgttaaattactttagaactatttcctagatttaaaaatactaatgcagnatattataatagnngcttngaaattt

SEQ ID NO: 2274 - DNA, 509 bp, Homo sapiens
tttgaaaagtatttacttagtttaaataaattaattgcaaataaaaattaagctacaatatatagcctgaataaaaatgactagaacaaatacaacacaggacttgctttcttgcattagtcacaaagcatgtgacaatctagaaaacttcaaaatcaattacatttctttgaaaaaggggtaacagcagttactgatacatcacaactaataaacttataatacaagtttcctgacatgcatttcctgagtgaacccaaatgatcattttttaaaacaaggaagtttcgacagttgaagtaaaataaaataattcatggcttctaagcaacaagttttgttttttaaaaaccaaaagaaaattcagaacagttttgtaataggataaattaaaggtatgctaccacatataaaactttgctacagtcagttaagtattatacaacttttcaaactaaaggaaaacaaatcaaaatattaaaagaagatactgtctaatctaaaagtgt

SEQ ID NO: 2275 - DNA, 370 bp, Homo sapiens
  misc_feature 360, 366: n = A,T,C or G
gccagggcaacagaatgagactttgtttaaaaaaaaaaaaaagtgacttgatttaagggaaaaaatgactggctatattcagtcagatatggcaaaaagtctcaaggtgttaatgtgaatgattaaggtcttggggggggtgtcccctatcagactacaggtgtttagaggcacagaaaaaggtgcagttgggttcttaatgtgaaatgatgagaagcacaactccagtgtgtctctttgtgtagaatgtcagcagacaccccctgctagatgtgctggatcatgggaaagcatttccatttgttactagattgttcagaagttttaatttatgatgggtgtggtggctcatgcctgtantcccancact

SEQ ID NO: 2276 - DNA, 535 bp, Homo sapiens
acaatctaactcagaatgggattaaaaattttagaagcagaagctaatatataaatgaagtttgggatttggaactttctgtatctcttaggaggaacaagtaaaaaccaaatggttacattgtgctgctagaaataatgtcattctcaattaaaagggttacacctgtagccacttgacactaacaccatcgagggcaattaatcaggagaaaagtaaatataaaaactgctcttaacgtcacacactacagggtaattatgtaattctctagcactcaattaagaagcttgtaggttagcaaaatttcagtttctctagttcagccagtgtcttgtccttagtaattatttgctttccctgcagttcaatttctccttggaactctaacaggactaactggaaaaatactttgaccatagctctagtacctgcccgagcggccgcccgggcaggtacaatggtgaaccagtccagatccgggtcccaatgggcaaggagccacctcatcttatgtccatcttcaagggacgca

SEQ ID NO: 2277 - DNA, 177 bp, Homo sapiens
acgaactccacggcggtggggcgctaactagcagggacccctgcaagtgttggtcgggggcctcgagctgcctgagctgacacgaggggaggggtctgtgtagccaacaggtgaccgaagggcttgcctgcccacagcttacttggccaaggggtttctgaagttcctgccggcaaa

SEQ ID NO: 2278 - DNA, 407 bp, Homo sapiens
  misc_feature 382, 395: n = A,T,C or G
acggactctggggaactcagtcccctcattaggagggagtcacagtcactgccacccctacctgctcctgatgcaggaacacagaaccgatcctggggttgcgagggctcatgactcctagtggcatcggtggggaaactgaggcctgaggccaggcgtggtggcctataatcccagcactttgggaagccgaggtaggcagatcacttgagtccaggagtttgagaccagcctgggtgacacagtgaaaccctgtctttacaaaaatacaaaaattagctagcgtggcagtggatgcctgtagtcccagctactcaggaggctgaggtggggggatcgcttgaaccccagaggtagaggttgcagtgaaccgagattgcancactacactccancctgggtgacag

SEQ ID NO: 2279 - DNA, 242 bp, Homo sapiens
  misc_feature 186, 204, 207, 208, 225: n = A,T,C or G
acagtatgtatcatgatttttcacacatcatgaatatttaccaattcaaaatcccaaagctatatgagtattctgataaccaagaatacactacaccaactcaaactgctaaaaaaaaaaaaaagatgtaatcctgcctttcttgggacagaaatttcatataagacaaaaatggcaacacgcctntagataaaagcattggcnganntctgatttaaatgctgnattcccttaatgctcaa

SEQ ID NO: 2280 - DNA, 516 bp, Homo sapiens
acaaaaacaatacaaataaaccaactgtattttacacataatcaacaggaaataatgtgggctaagtaatttggattaacattctcacttgaaaacatttagaaaagctggataaaatatacttttcaaagatgtaggaaggcagcagggagctgataagttggtgaataattaccatgccaataatatctgagaaaagatagaaattcagaaaaatgaaccattcatttgggaccactgtgttaggagtatttatagattgcaaaaggccactgggaagttgagtagatagagctaaggggctaaagattcaaaaagagtcccgggtcagtgaagaggtaagggcctggtaactccaaaccatgctttgaaaccctgaatggttgaaccctagaaataaggatgaacagaagagcattaccacagtctgtggctcagctttcagtcacctaggtgacctggaaaatttcagtatctgaaactggatcaaaataatcctaaattactaatgcaggt

SEQ ID NO: 2281 - DNA, 297 bp, Homo sapiens
actctggaccaaaaataaaacttctttgaaggagacggaatcctttttagcaataaggacactccatatgccgttgggcaagaggaattagcctacagaaaggatctggcggtgccaaggcttggttaggcctttgagaagctaagcttggttaaaaggagttttaggatggaattgaaaactgagtctagttctgtttgaagggggcagctttttactcagctttgtgcactttggggtgctcgctcggggtgtccgcatttctcagaccttggtttggttccctgcacagtaagt

SEQ ID NO: 2282 - DNA, 435 bp, Homo sapiens
  misc_feature 220, 355, 378, 399, 429: n = A,T,C or G
acataaaagatattaaaaattaaaccaacattcttcccattgcctgtttttatgaaacactggatctaaaaaggtttctgaatgcagaaagctgccgtctggcattggatttgctgtttagtgtgcttttatttatgaaacatagtgatcatgtttcatttgctgtatattggcaagtgctcttggaactggcagaatattatcctttattaatttgcantttgagaggatccagaatccagatctctggaatagctaccaggcaaagaaaaaaactatggatgccaagaatggccagacaatgaatgagaagcaactcttccatgggacagatgccggctccgtgccacacgtnaatcgaaatggctttaaccgcanctatgccggaaagaatgctgnggcatatggaaagggaacctattttgctgncaatgc

SEQ ID NO: 2283 - DNA, 334 bp, Homo sapiens
gagcccgaagaagaacctgaagagacagcagaagacacaacagaagacacagagcaagacgaagatgaagaaatggatgtgggaacagatgaagaagaaacagcaaaggaatctacagctgaaaaagatgaattgtaaattatactctcaccatttggatcctgtgtggagagggaatgtgaaatttacatcatttctttttgggagagacttgttttggatgccccctaatccccttctcccctgcactgtaaaatgtgggattatgggtcacaggaaaaagtgggttttttagttgaattttttttaacattcctcatgaatgtaaatttgt

SEQ ID NO: 2284 - DNA, 321 bp, Homo sapiens
ccattcaattcagggttagtcttctagacttgcggtcaccaaaccaaataaaccagatgacctactacagaatgggaaaaaaatgctagaactttctggttccattagactttttccaatattcctttacgtttctatttttattacttgctaaaatattagtaagtggcccacatacaactacaaagacacacaaaaattgagatatgtgaaaaatgttattgatagggttcaaggataagtgttcatattcaattccaagggactgaaacacactaacaatctgacactttgatgtcacactagtatagactagttagt

SEQ ID NO: 2285 - DNA, 136 bp, Homo sapiens
  misc_feature 24, 103: n = A,T,C or G
caggtgcatttacaaagatgcgtncaaatagtgctctaagagttttgttcagtggctcacttcggctaaaatgcagaaatgcatgctggcagcgttggtattncgcattcaatggagctgaatgttcaggacctct

SEQ ID NO: 2286 - DNA, 218 bp, Homo sapiens
actggagcttctctttaactcaggactccagcccattggtagacgtgtgtttctagagcctgctggatctcccagggctactcactcaagttcaaggaccaacaagggcagtggaggtgctgcattgcctgcggtcaaggccagcaaggtggagtggatgcctcagaacggacgagataatgtgaactagctggaattttttattcttgtgaatatgt

SEQ ID NO: 2287 - DNA, 85 bp, Homo sapiens
  misc_feature 49, 52, 60: n = A,T,C or G
acaagcttttttttctttttttttttttttttttttgtaagaatagttncanaaatgttnactaatgagatgaatacatggaagg

SEQ ID NO: 2288 - DNA, 558 bp, Homo sapiens
tgaaatgctagcactgctctgtgtgctaacatttcatggccacagacctgaagtcgaacatcacagaactggccacttttcctcagggcatttaatttggcaacagagcagtgctagcttgctgcagtccctatttatttgaaatctttaatagtgatagtgatcctcatggaatttctcacgttaaatttgatgatctcaatccagaagctgttgaagtcttgttgaattatgcctacactgctcagttgaaagcagataaggaattggtaaaagatgtttattctgcagcaaaaaagctgaagatggatcgagtaaagcaggtttgtggtgattatttactgtctagaatggatgttaccagctgcatctcttaccgaaattttgcaagttgtatgggagactcccgtttgttgaataaggttgatgcttatattcaggagcatttgttacaaatttctgaagaggaggagtttcttaagcttccaaggctaaagttggaggtaatgcttgaagataatgtttgcttgcccagcaatggcaaattatatacaaagg

SEQ ID NO: 2289 - DNA, 249 bp, Homo sapiens
actccagcctgggcgacagagcaagactccacctcaaaaaagaaatatttagcaaatattaaaggacaagagggaatatctgtttaaaaaattataatgcacgttagatgaaaagtaataggatgagatggttgttgctgaaatagcacttgctatataaattcaaacattccttttcaaattcagcttctcagaggtttgacttcagatgcttgagcactttcaacattatctttgcctttatccttc

SEQ ID NO: 2290 - DNA, 481 bp, Homo sapiens
  misc_feature 263, 288, 301, 305, 456: n = A,T,C or G
ttttttttttttttttttttttttttttttggttttgaacctttaataaaagtaaaaaatgaatgcaaaaagaacacaatgttgaaaacttagtatgaatgtgaacctcactagatgttcaaatctggtagagtgcaaattttgttcatactattttacatttttacaaactcaaatcactttggttcatatattttctataaactattggcaaaaaaatcctcaaatttacattcttttggctacattatttctaacagatntagatttacttccggtttcggaganaaagacttattgngtgngcgtgatcaagtctgttttaaagattcactcgctgctttcatctaataacttctggtttttcataaaatgctgacatcttcattggaaatttttttcatgtaactgttttcattttcagaaaatatataagggggtcattccaaagttcanaatgatcctatttttttaaaaaaca

SEQ ID NO: 2291 - DNA, 124 bp, Homo sapiens
  misc_feature 68, 104, 106, 116, 117: n = A,T,C or G
actcatgcccgactgtctaccaggcacacagactttgaggagagggcgtatgtcgtcttgatccgcancaatgatgggggtcggccacccttggaaggcattgntnctttaccagnnacattct

SEQ ID NO: 2292 - DNA, 165 bp, Homo sapiens
taacattgaaaggtaaaatctgattatttagcatgagaaaaaaaaatccaactctgcttttggtcttgcttctataaatatatagtgtatacttggtgtagactttgcatatatacaaatttgtagtattttcttgttttgatgtctaatctgtatctataatgt

SEQ ID NO: 2293 - DNA, 308 bp, Homo sapiens
tatcttcacttttataagaaataggaaatattttaatgtttcttggggaatatgttagagaatttccttactcttgattgtgggatactatttaattatttcactttagaaagctgagtgtttcacaccttatctatgtagaatatatttccttattcagaatttctaaccgtttaagttctatgagggctaatatcttatcttcctataattttagacattctttatctttttagtatggcaaactgccatcatttacttttaaactttgattttatatgctatttattaagtattttattaggagt

SEQ ID NO: 2294 - DNA, 393 bp, Homo sapiens
  misc_feature 14, 117, 298: n = A,T,C or G
acaccatgcatttnatttggacgaaaagtaaaagtggaagaggttctctctgtatttcctctataattcacacgctgagatactgacctctgactgttaggtgatccagatggtttngcttttaattatgataaaaaaacataggaaccatgagagatagcttaggaaaaggtttagtcaaatatacagataggaactgttcactcagtcattaaggagagccgtgaacaaaggatcatttaaatgattttttttttcaaatagaaaaactaaagaactgaactatcacaggaatttntcttcactgcagaagctgagatgttccagtaggagaagtaggagatatcttcacttgattggaaaataaacaccgaactcaaggctctgctgcgt

SEQ ID NO: 2295 - DNA, 428 bp, Homo sapiens
actttgatttggaaatatataccactggacgattagaaaagcatttggatgccttattgcgacagatccggaatattgtagagaagcacacagatacagatgttttggaagcatgttctaaaacttaccatgcactctgtaatgaagagttcacaatcttcaacagagtagatatttcaagaagtcaactgatagatgaattggcagataaatttaaccggcttcttgaagattttctgcaagagggtgaagaacctgatgaagatgatgcatatcaggtattgtcaacattgaagaggatcactgcttttcataatgcccatgacctttcaaagtgggatttatctgcttgtaattacaaactcttgaaaactggaatcgaaaatggagacatgcctgagcagattgttattcacgcactgcagtgt

SEQ ID NO: 2296 - DNA, 348 bp, Homo sapiens
  misc_feature 289: n = A,T,C or G
accattcttgagtgatcgcttaggtaagttttaattggtgacagtataatcttttgggaaataatgattacagttcagatgatgaatttaactgttcaactgctgaatgataacgggcatgaactaaaacttaattctgacagagctggatatggctgtataataaactggatcttaaatttatacttgggttttagttttaataactggaaatgtatcctttctaaatctttaattggtacaagcttttttttttttttttttttttttttttgggcccatttgagtnttttgttttcaattagggagatagttggtattaggattaggattgttgtgaagtatagt

SEQ ID NO: 2297 - DNA, 435 bp, Homo sapiens
  misc_feature 94, 234, 244, 291, 325, 352, 358, 372, 374, 379, 394, 403,413, 418, 426: n = A,T,C or G
acaagctttttttttttttttttttttttttttttgctttggaaaaggaattttaaaccttaaattaaaaaaagaaaacattttcacacagaanaattatctgctttgagaaataaagaaattagaaggtgtaaaaaaaattttttcaaaccccaaataatgataaaaatagatgtatcctctgtaaaaatctggactaaactattcagtcattcatggttattcagtattcanagcatgaagngaaacaccaaagtataaaaaattaaaaaaaaaaaaaaggaatccganatactgtcgtttgttgccggcctcggcgtggacnccccgaccatgggccacgcagggcgtntgcctnctcccaccttccgnanacctnaggccttcaaagctnttccttggncctgctcagntttgnggcatgtncttctataa

SEQ ID NO: 2298 - DNA, 397 bp, Homo sapiens
acaaaactcaaatagatgaacttttaagacaaagtctcagttaacttgtgaaaattgaattcccatcaaactgaatgtaagcatttaatatctaaacatttaatgtggacttccaataaattcttttatagaattagaaagtgggatttactgtagagtgtaaaaatttttttaaaattgttttacactatgtagtaatatttacagttaaattattttgtgcaatatttgaactttatttttgaaactattctttaaagatttattttttaaagcattcattttttttccttgaatagcacagagatttattactttatcctcatataaatatggctagagaagaagaatggtgttcatatatgtattgtagatatacaactagttgtatctataa

SEQ ID NO: 2299 - DNA, 486 bp, Homo sapiens
  misc_feature 130, 146, 165, 181, 255, 292, 369, 389, 412, 464, 467, 477: n = A,T,C or G
ttttttttttttttttttttttttttattttttttttttacacactttaaaaactttatttatataaaaaactcatttgtttttaaaagcattaacaagacagaaagaaaagagaaaaggtttggagcanaacacaagccccttantagtgttcggtgggaaggngggatttttggttctntggaattgaatgtttagtgttttttataaacaaaagagagaaaaaaaagttaaaggtccccaaaagcccacggntgttctattacccacaccccaccgagaaaaaagagcnccaagaaaagagcagaagaggacaagagagatcaagagtggagccaggtctggatggggcaattttccctgtgcagngtgctcttagggtcacaganagcaaaaggctcctttttgccanaaaaggtagatgaaagtgggaagaaatgggaagggggaaaagggtaaataanaanttttaatgcncgagtaaag

SEQ ID NO: 2300 - DNA, 249 bp, Homo sapiens
  misc_feature 202, 203: n = A,T,C or G
acagggctctgggaagggggcagtcctggcggcagaacccggcctgcaggggcactttgcttagaagaggactctcctagcgggagaggctgggaggggctgcatcaggccgtggagctggttgctgtggtcatcagtatggctgcttgttcaggaagcgggagaacatggtgaaggcagcgaggggcttgtcggtgggaannatgtggccggcgcccttgatcgtgagaaaggcgatgtgggagaact

SEQ ID NO: 2301 - DNA, 314 bp, Homo sapiens
acagtcataatttgttaaaatgacttcatttaacattcactgatgtagattaataatgtaagttctgatttaaagaatggtggcaaaatggtgcatgtaatacttttgcaagtgttggggagatcggtatgttttgaaaagagtaatttaacttttgggtgccaggaaatgggttttctcaaagtccattgccggcaatgggcaggcctgcaaatactggcacagagcattaatcatacaccttattaacggtgaggtgaataactttgaaataaagttttagagaaatgtttcaaaaaaaaaaaaaaaaaaaa

SEQ ID NO: 2302 - DNA, 561 bp, Homo sapiens
accatcaactgaaggaaacagtcaacaaggcagatttgacgacctggaaaatcttaattcattagcaaaaactagtctggatttaggcatgatcccgaatgatgtccaaggtcctagcttgctcattgaccttcctgttgtggctcaaaggagggagcaagaagatttgcctttatatcaacaccaagcgacacgagttatttccaaggcctcagcatacacaggaatgttgtcttctagatatgccactgatacatgtgagttacctgagagagaagaaggcgaaggagaagaaactccaaattttagccactggggtccaccgagaattgttgagatttttagagaacccaatgtgtctcttgggatcagtattgttggtggacaaactgttataaaacgtctaaagaatggagaggagcttaaaggtatattcatcaaacaagttttagaagacagtccagcagggaagacgaacgcacttaaaactggagataaaatacttgaggtgtctggagtagatttgcagaatgcctcacacagcgaagcagttgaggccat

SEQ ID NO: 2303 - DNA, 542 bp, Homo sapiens
acccttaaactggctggacatttttgaaatcacaaatttgcacataaagaatgtcacgaacagccatgtatccatatacagcaatcaaataaggaacttatgacctaaagcaagggtaaactttcttgaaacttaacattctataccaactaggcaacctctgcccaggatgagagttggatttttcaaaaacctctaatttaatagtgcagcatttcgttttccctgatggcctgtgtttcacagcagtttttaaagactgcttgttcaactatagctgcagcctatatcccagctatggaaaaaaaagtaaatcttagttcaatttttgccagttgtttctgtatttaaatttaaaaaaaaacacacttccgctgggcaggtttagaggtttattatcagtctgtgcataactaaaagttcaaagcaaattcaattttgcttaagggaacattgtaaagtaacaattcttggtattacatgcctcgtatgatccatttcaaaccatagagaattacacctttgtgtcactgtttcagaga

SEQ ID NO: 2304 - DNA, 402 bp, Homo sapiens
  misc_feature 18, 39, 52, 92, 321: n = A,T,C or G
gcaaatataatgatctcncatgtgctaaggaagtggctntaaaacttaaatntattataaatgtgttaaatctttatgcaaaatgaacaacntgccccaatttatatttcagatatatgtggatttacttataacggtttgttaaacgtaagatatacgtgtattaagtgactaaaagcacagagaaccatgtaaatgttgtagaaaattattaacaatgttcgtccttactctcctgagagctcatgcacaaagccaagataatatcagaataaggcatttgtatagaaaactatgacagaactttggccttgttattgngctgtttaattctttcttcgaaagggtgtatacaaactgagtgcaacaagccaatctaaatggtaaaactcctaagggagg

SEQ ID NO: 2305 - DNA, 583 bp, Homo sapiens
actttaaaaaaacaaaaacagctttattgatatataatttacatattatgtaatttacccacttttaagtatctaattcagtgatgttttaatacatatgtagaactatgcagccatcagcacaatctggatttagaacgtttccatcattccaaaagattccttttgtcttttttgcagactcatacctaacacaaatctaaagtttatcactgttgccaggataattacagcaggttatgtttggtttcatttttaagagtggaggtgttcatgattctaagctcaggaatcttgtgatcatgtattaaatatgttatctcatactataatgataaaaaagcttaatgatgtgggttgggatggatattaacataaataattgagtccgctgcttctatagcaatgctgtaggatagaacaataatgtaagtgatatatgtaattaaaaaattctagaagccacattaaaaaataaaaataaacagctgaagttaattttaatattttatttaactcaatacatccaaaatgttatcattttaacatgtaattgatgtaaagatttattctgatagtttgt

SEQ ID NO: 2306 - DNA, 486 bp, Homo sapiens
acttttgaaatgtgtctgtctttgtcccattagatagtgactcccttaagacacgggccatttctaagtcatcatttatgttttatgttttttataatggtgactttttatatagtatttgttgaattgaaaatttgatgtccatacaacttttaggaatactttgctgggacacattacataaactaggagaacttaagactacgaacagaatatttggactaatcattaagaaatactaatttaagtatggcaaaggaaagcacaggtgccatgatgcgacatttttgtaaaggtattgattggggttttgaaagcgatgttagggtatcctgatgggatggcattatcttttatgtagataatacttagcactgatcatccccttacttgagtgttgtttccatttctaggttcctcaacttaaaagggatgaggagaccttggagacggttctgaggagactcaaaagatgattatatgatt

SEQ ID NO: 2307 - DNA, 434 bp, Homo sapiens
acccatcatataacccaaaggcaatgtctcgattggtagttgtccaggaaatccgtaaatctactaagtgcagctgatgtgtatgaaaggtaggatccccatcacgagcagagagctcctcctcagctgtgcgattgctatgccgttggtaggtgagggaggacaagctcagcaggtgggtctttgttaccaagggatcaagacagtgatcagcattctcttcagtgggtgaggccatcaggtgaacggtcacctgacttaggtcactcaccatctgggtaacactccaatcagagataaggcgccgcatcactgtgcctgctgagaaaaagaggcacacagagaccatgctgaccagttcagaggatagtgtaagacagagatggaggaggggaatggaactgagaagggaaaaacaaggaacaggataggag

SEQ ID NO: 2308 - DNA, 166 bp, Homo sapiens
  misc_feature 84, 124, 150, 151: n = A,T,C or G
cagcctggcacggtggtcagaatgcagggcctggcctacaatactggagttaaggaaattcttaacttcttccaaggttaccantatgcaaccgaggatggacttatacacacacctgaccagnccaggactctacccaaagaatgggtnngtatttaagggcccc

SEQ ID NO: 2309 - DNA, 311 bp, Homo sapiens
acaagaaccaagtgaagagggaaaattgtaagtgctgtgaaacttaaatcctggtgttttttcccattgacaactaaaattgatggtgatcttcatgaccagttgatttctattggttcttctagagtaacattgtgtgtggtcagatcaatacgtaatatcatgttggtagtgtcttcattaaaaggaagcgaatttttatttccgttatacgttagagtaactgcattgacaggagtagttcctttcccccatacatgaagggatccaagcctcgtttcacttttatttatgtaacctctcttcaatat

SEQ ID NO: 2310 - DNA, 398 bp, Homo sapiens
  misc_feature 132, 152, 178, 185, 196, 200, 239, 258, 300, 329, 356, 394: n = A,T,C or G
acaagcttttttttttttttttttttttttttcaatatttgaaaaatgtaacttttattctgaacatgtagtatttatctttattagcaatttttttcataatataagcatgcctcaatcatccaaaagctntctacctatctatataaatngatatacatgctactgaattgacttnttaatanaatcatatggnaagngttataatgactaatcaacctacttctgataattttggngtaaacaaaaatgatattnaatttttattaaatcaagtttacctatcaaattcccttttanaaaaacactgcaagtttagtcttaccaanattgcaagtaaattttaaaattatggngctgaaataaaaaggttttaagttgaaatgtgtacctnggcc

SEQ ID NO: 2311 - DNA, 299 bp, Homo sapiens
accatatccatgcacatttagttgcctgcctgtggctggtaaggtaatgtcatgattcatcctctcttcagtgagactgagcctgatgtgttaacaaataggtgaagaaagtcttgtgctgtattcctaatcaaaagacttaatatattgaagtaacacttttttagtaagcaagatacctttttatttcaattcacagaatggaatttttttgtttcatgtctcagatttattctgtatttcttttttaacactctacatttcccttgttttttaactcatgcacatgtgctctttgt

SEQ ID NO: 2312 - DNA, 265 bp, Homo sapiens
gctatgacaagcaaaggaacatacttgcctggagatagcctttgcgatatttaaatgtccgtggatacagaaatctctgcaggcaagttgctccagagcatattgcaggacaagcctgtaacgaatagttaaattcacggcatctggattcctaatccttttccgaaatggcaggtgtgagtgcctgtataacctattctatgtttaccttcaacttcttgttctggctatgtggtatcttgatcctagcattagcaatatgggt

SEQ ID NO: 2313 - DNA, 562 bp, Homo sapiens
  misc_feature 547: n = A,T,C or G
actgggattacaggcttgagccaccacacccggcctatatgtgttcttataaaatgttgcaaatataatgatctcgcatgtgctaaggaagtggctttaaaacttaaatctattataaatgtgttaaatctttatgcaaaatgaacaactgccccaatttatatttcagatatatgtggattttcttataacggtttgttaaacgtaagatatacctgtattaagtgactaaaagcacagagaaccatgtaaatgttgtagaaaattattaacaatgttcgtccttactctcctgagagctcatgcacaaagccaagataatatcagaataaggcatttgtatagaaaactatgacagaactttggccttgttattgtgctgtttaattctttcttcgaaagggtgtatacaaactgagtgcaacaagccaatctaaatggtaaaactcctaagggaggaaagtttctctaagtaaatctatttgtgaatttaaatgtgagtttcacaggactggttaccaaaaattgtgccttaatgtagattatnaacacatcactactt

SEQ ID NO: 2314 - DNA, 517 bp, Homo sapiens
  misc_feature 451: n = A,T,C or G
caaccaccagatgcttgggatgctcctcacacttgtaaaggttacgttacagtggatattttgggggcgttactgccctaagcagagagcagtttttcaaggtgaatggattctctaacaactactggggatggggaggcgaagacgatgacctcagactcagggttgagctccaaagaatgaaaatttcccggcctctgcctgaagtgggtaaatatacaatggtcttccacactagagacaaaggcaatgaggtgaacgcagaacggatgaagctcttacaccaagtgtcacgagtctggagaacagatgggttgagtagttgttcttataaattagtatctgtggaacacaatcctttatatatcaacatcacagtggatttctggtttggtgcatgaccctggatcttttggtgatgtttggaagaactgattctttgtttgcaatnatttttggcctagagacttcaaatagtagcacacattaagaacctgttacagctcattgttgagct

SEQ ID NO: 2315 - DNA, 331 bp, Homo sapiens
  misc_feature 307, 317, 321: n = A,T,C or G
acatatctttctgtctttagtttattgtgtgctggtctaagcaagctgagatcatttgcaatggaaaacacgtaacttgtttaaaagtttttctggtagctttagctttatgctaaaaaaaataatgacattgggtatctatttctttctaagactacattagtaggaaaataagtcttttcatgcttatgatttagctgttttgtggtaattgctttttaaaggaagttattaatatcataagttattattaatattttgaacacaggtggatgtgaaggattttcatttaaaaaccaagtggttntgactttttntgtngaatgaacaa

SEQ ID NO: 2316 - DNA, 102 bp, Homo sapiens
gaggttctggatcctggtcaaactttaatttattatgttgatgaaaaagcacctgaattctcaatgcagggtctaaaagctggtgttattgctgttattgtg

SEQ ID NO: 2317 - DNA, 464 bp, Homo sapiens
  misc_feature 455: n = A,T,C or G
acatcttctcctaaaaacaagggtagagccaatggaaagtaatggttctgttacatagaatgagttgttgccttgatcttaaatgatgtattggtagatatacttcccaagtggattaaaaagttaaaacttacagcataacaaagtattagacttactgaggtgacttgaatatctccttttgattttcactctatttttcttttcacccatgggaaaatgataattttttaataaaccaaggctcttaccatagctgaactttaaaacttagactgtcttttctgtaaacgattctgaggcaaagggaaatgactagaagaggatgagtaaacaataacctgaaatgggaaactcgagggaagcacaggttttttttgttttgttttgtttggttcgttttttgttctttggggtttttttgagacagaatttcgctctcgttgcccaagttngagtgcaat

SEQ ID NO: 2318 - DNA, 512 bp, Homo sapiens
attctgtagtccagtgcttgccaatgcaaattgcctattggaatcttcttcctatattttacaaacatcagtggctgaaatagctcagagtaagagctcagcctggtttgaatttaatcatctctttagatcttataaggccagcattaggaaacttgttcacttttcattttcaaaggagcctagttgaagtgctattatgagtgtgggctatggaaagacagcttttcctacactgataaagaaaaaaaatgaggaaattatttcatccccttgtgacatctgtgactttttggatttaataatcttgctgtttttcctctttatgacaaagaatataattgggaggatgaagtgtcttaaaaattgtagagaccagctcactggaatgtttttccatccctgtattcatggcttgactttgtgactgctctacactgcatgtctgacattgcagagtgagctatgttgaggtaaactggttggttgtcattatttttgcaatcagcctg

SEQ ID NO: 2319 - DNA, 336 bp, Homo sapiens
  misc_feature 121, 299, 325: n = A,T,C or G
acaggctttggagacagaggatcctggcttggaatcccagctctaccacttactagctaggtgacctcagagaagtaactttacccctctgagcttcaggatcctcatctgtaaatcaganaaaatactttctgtcttccaaagttattgtgaggattaaattaatagtatatggaaattgcctagcacggtgttctattattgataagtgtttagtaaatttgtgtctccttttgggcaatccttgaggaaagcaggtccagtttgatacaaatgaaaacactcatttaaaaaacagnggtgcccacacaccaagtaaataatnattgcccaatc

SEQ ID NO: 2320 - DNA, 482 bp, Homo sapiens
  misc_feature 41, 53, 92, 134, 230, 266, 284, 291, 296, 309, 324, 326,329, 350, 352, 381, 402, 439: n = A,T,C or G
acaagcttttttttttttttttttttttttttttttaaggntaaggaattttntttattttttacaaattaagactatgcagatttcatatntttctgaatcaaaaacacctttgtcttcacagtatgagttanaatgcagcctgagctgaaaatcaagaaactagaaaagaaagtggtagagataactatattaaaaatctgttaggcattttctttaaaagtaggggntttttttttttctttttctttttttttttttttaanatcttggcattcttggcnctgtttntaaanaaaaactccattntcccaagcaaaaaancncanaagggggagtttggcttcaananatgttaactcaaaatcttaggcctagcanaaaatcaccaaatttatgganagttaacaggggtttaacaggaaggaaatgcctttantaagttctcaagccaaaggctggaggcagcagctaaatcaaaa

SEQ ID NO: 2321 - DNA, 523 bp, Homo sapiens
acacatagttcctccacaattcctatacctactgctgcagacagtgagtcaaccacaaatgtaaattcattagctacctctgacataatcaccgcttcatctccaaatgatggattaatcacaatggttccttctgaaacacaaagtaacaatgaaatgtcccccaccacagaagacaatcaatcatcagggcctcccactggcaccgctttattggagaccagcaccctaaacagcacaggtcccagcaatccttgccaagatgatccctgtgcagataattcgttatgtgttaagctgcataatacaagtttttgcctgtgtttagaagggtattactacaactcttctacatgtaagaaaggaaaggtattccctgggaagatttcagtgacagtatcagaaacatttgacccagaagagaaacattccatggcctatcaagacttgcatagtgaaattactagcttgtttaaagatgtatttggcacatctgtttatggacagactgtaattcttactg

SEQ ID NO: 2322 - DNA, 562 bp, Homo sapiens
  misc_feature 234: n = A,T,C or G
actgggattacaggcttgagccaccacacccggcctatatgtgttcttataaaatgttgcaaatataatgatctcgcatgtgctaaggaagtggctttaaaacttaaatctattataaatgtgttaaatctttatgcaaaatgaacaactgccccaatttatatttcagatatatgtggattttcttataacggtttgttaaacgtaagatatacctgtattaagtgactaaangcacagagaaccatgtaaatgttgtagaaaattattaacaatgttcgtccttactctcctgagagctcatgcacaaagccaagataatatcagaataaggcatttgtatagaaaactatgacagaactttggccttgttattgtgctgtttaattctttcttcgaaagggtgtatacaaactgagtgcaacaagccaatctaaatggtaaaactcctaagggaggaaagtttctctaagtaaatctatttgtgaatttaaatgtgagtttcacaggactggttaccaaaaattgtgccttaatgtagattataaacacatcactactt

SEQ ID NO: 2323 - DNA, 369 bp, Homo sapiens
  misc_feature 265: n = A,T,C or G
tacttgatcaacctgccaatttgctgcggatgttttttgattgtctatatgacgaggaggtgatctccgaggatgccttctacaaatgggagagcagcaaggaccctgcagagcagaatgggaagggcgtggctctgaaatctgtcacggcattcttcacgtggctgcgggaagcagaagaggagtctgaggataactaaaacttcaaatacacaaaatgaaacaaaagaaacaatttaagtatttttttaaaaagtttcacgtnttcgccaatcacagtgcagcaaggccaattctcgcagaagcccccacgtgtgcacgagtgggagaggggaaagagaaaaaaaggtgatcatggaggaaaaaggt

SEQ ID NO: 2324 - DNA, 322 bp, Homo sapiens
actacttctactggaaataaaaactttttagctggaagatttagccacttataaaaaaaaaaaaaaaggatgatcaaaacacacagtgtttatgttggaatcttttggaactcctttgatctcactgttattattaacatttatttattatttttctaaatgtgaaagcaatacataatttagggaaaattggaaaatataggaaactttaaacgagaaaatgaaacctctcataatcccactgcatagaaataacaagcgttaacattttcatatttttttctttcagtcatttttctatttgtggtatatgtatatatgt

SEQ ID NO: 2325 - DNA, 405 bp, Homo sapiens
catccctgtccctcagggtagcaccatggcaggactgggggaactggagtgtccttgctgtatccctgttgtgaggttccttccaggggctggcactgaagcaagggtgctggggccccatggccttcagccctggctgagcaactgggctgtagggcagggccacttcctgaggtcaggtcttggtaggtgcctgcatctgtctgccttctggctgacaatcctggaaatctgttctccagaatccaggccaaaaagttcacagtcaaatggggaggggtattcttcatgcaggagaccccaggccctggaggctgcaacatacctcaatcctgtcccaggccggatcctcctgaagcccttttcgcagcactgctatcctccaaagccattgtaaatgtgtgt

SEQ ID NO: 2326 - DNA, 376 bp, Homo sapiens
acaattaacacaaaatgttctgagggtagtagcttttcatgcactgaagaatgagatcctaacaacattgcacatcttggatacattagaaattttaaaagccatgtgtaatttcagaaaacttaataccgtcatgaaagacattttcaacacaaaatttaggcactctatactttggaatagccataaaatattccaacaagagttaatgcactttgtgattacatctactcaaagataattctcaattaaaatctatacttattaaataacattttaaattagagcccattaaattttgataattactgtgaaatatttgcagcattgtgttgtagttaaataatgctgaactacttctattactgactctagt

SEQ ID NO: 2327 - DNA, 96 bp, Homo sapiens
gtgctgtgcaaatagatcagtagtgagtgagtgttaagtgaaagatgagctaggttgaagaaaatatacattttattgatgagccactttgctatc

SEQ ID NO: 2328 - DNA, 138 bp, Homo sapiens
actacagcttcttcgatttggatcccaagacagaccccgtgcggctgacacagctgtatgagcaggcccggtgggacctgctgctggaggagattgactgcaccgaggaggagatgatggtgtttgccgccctgcagt

SEQ ID NO: 2329 - DNA, 526 bp, Homo sapiens
actgttttgagttttgtcattaaaacagccacctttgtattttataatttatgacagaatgaagtcattttgaatctacatgaatgaacactttggattttgttgtagtttgattctagggtagaaccagtccatgctgtttttattttttatctccgtaattgtagaatcatgtttactcaacgtttttccccagctgcctcagtaactgggcactcggaggccttggcacgggttctggaggacagacagcaattctatgagtgctcactgagatacttgctggagacctcagaaaacacaagtgccttctccacggtgcaattcagacttcagtgatctccagtggtcaaaagacatttacccttaatatcagacaacatttatattttagtgaagaaacaagttctcgggtggggaatctatgtttcactcagatttatatgtttggaggaaaaaagcctttttttgtaaaatatttaaatttatataagaaaatgttagaaaaaaatatggggagtgtata

SEQ ID NO: 2330 - DNA, 441 bp, Homo sapiens
  misc_feature 29, 64, 95, 151, 195, 206, 284, 292, 331, 378, 396, 435: n = A,T,C or G
accacaaaaacctaaaagttaaatgttanattaaataaaattataaaatatccacacgagaagnatgtgtatacaaagtattgtatgtatgcagngaaatgagagtgcccatacagttatatgcaaacttttgaaagtttcatagttgttnaacaaaatatttttaatgttgatagtgacataaaaacatcacangaattatctanataatatagcaatattgccaaaatttgagtcaatgttacctgtgagtgcaataggtcatcattgatcgcgtcctttcntgacctgncggtaatttagatgattgaaggaatattatgaatgtatntacactgtgagtgtgaaagggcaacatttttcttcctaaagaactgnatttactaaaatatattntttttggcaagatgtgatttatcaggcaacatcacttgnattagg

SEQ ID NO: 2331 - DNA, 381 bp, Homo sapiens
accttttagtagtaatgtctaataataaataagaaatcaattttataaggtccatatagctgtattaaataatttttaagtttaaaagataaaataccatcattttaaatgttggtattcaaaaccaaagatataaccgaaaggaaaaacagatgagacataaaatgatttgcaagatgggaaatatagtagtttatgaatgtaaattaaattccagttataatagtggctacacactctcactacacacacagaccccacagtcctatatgccacaaacacatttccataacttgaaaatgagtattttgcatatctcagttcaggatatgttttttacaagttaatcctaaagtcataaagcaagaagctattcatagt

SEQ ID NO: 2332 - DNA, 305 bp, Homo sapiens
acaagtggtggccacagaagtaggggggtcttccttaagctctgtgtcagagttccacctgatccttatggatgtgaatgacaaccctcccaggctagccaaggactacacgggcttgttcttctgccatcccctcagtgcacctggaagtctcattttcgaggctactgatgatgatcagcacttatttcggggtccccattttacattttccctcggcagtggaagcttacaaaacgactgggaagtttccaaaatcaatggtacctgcccggttttgtacaagctttttttttttttttttt

SEQ ID NO: 2333 - DNA, 424 bp, Homo sapiens
  misc_feature 397: n = A,T,C or G
tacatgacttggaaagaaagtatgcagcgctataccagcctctctttgacaagagaagagaatttatcaccggcgatgttgaaccaacagatgcggaatcggaatggcacagtgaaaatgaagaggaagagaaattggctggagacatgaaaagtaaagtagtcgtcacagaaaaagcagcggcaacggctgaagagccagatcccaaaggaattccagagttctggtttaccatcttcagaaatgtggacatgctgagtgaattagtccaggaatatgatgaaccaatcttgaaacacctgcaggatattaaagtgaaattttctgaccctggacagcctatgtcttttgtgttagagttccactttgaacccaacgactactttaccaactcagncctgacaaaaacctacaagatgaaatc

SEQ ID NO: 2334 - DNA, 218 bp, Homo sapiens
acaaagataaacctggacttctcctattccaatatgtcatctttactcagaatcctagggataggtagaagaattcatcttttcaagaaagtgttttaaaaatactttgggaaaaaactgcatcaaaggtaatttatcctcaaattaaatccttgcaggaagagaaattaacactaagaaaaagtcatcaatatttttcaactttttttttttttttt

SEQ ID NO: 2335 - DNA, 265 bp, Homo sapiens
acaatgctatatatcaaatgagaaaagctgtaagcaattatatacgcaaaagaaatgcagtatttacagtttgtcaggagacattagaaatcatctatacattaaattacattttgcttgcaaataactggtaaaacaaaatgagccatgtccacaccaaaatataaaaatctgtattgcatttttatacctaagatgcattcacagaactgctgctgacaggaaagaaaaaaaaaatcctcatagtgccattacttagctgagt

SEQ ID NO: 2336 - DNA, 551 bp, Homo sapiens
  misc_feature 355, 356: n = A,T,C or G
actctaagaatgggtgaaaatgacatttttaagctttgtatctttcagagtatctccttctctctgtgcacatggagttttgtgtctcttttgctttacccctagttctctagacctttaagactcttgtttaactgtgacggtatttgtgtttgaataagagagatgcaactgaaatacacaattagcattgtcttcacttatttccattttccctccttttctcccaaggtgtcttttgcagctcacattgcaggtggatttgctggaatgtccattggctacacggtgtttagctgctttgataaagcactgatgaaagatccaaggttttggatagcaattgctgcatatnnagcttgtgtcttatttgctgtgtttttcaacattttcctatctccagcaaactgacctgcccctattgtaagtcaattaataaaaagagccatctggaggaaataaaaaaaaaaggaagactctatgaagaaacagagaagtctcagcaaaggctaacaattttatatagaggacaaaacagcattaaactcatc

SEQ ID NO: 2337 - DNA, 368 bp, Homo sapiens
  misc_feature 330, 356: n = A,T,C or G
tgctcctctgcactctcctccccagttcgcagatttccgcccaccttccgcctcgtctagccgcgccacagctagcggggtgatctttccccccctctggtaggagttggtgaagatttctaccgcaaagagatcgaagtggactcttccccctccgtgctggaaattctggacaccgcaggaactgagcagtttgcctccatgagagatctctacatcaaaaacggccaaggtttcatcctggtttatagcctggttaatcaacagtcttttcaggatatcaagccaatgagagatcaaattgtcagagtgaagagatatgaaaaaggnccactaatcctagtaggaaataaagnggatctggaacc

SEQ ID NO: 2338 - DNA, 413 bp, Homo sapiens
acagtgatagctccccctgggcaatacaatacaagaacagtgggttttgtcaaattggaacaaggaaacagaaccacagaaataaatacattggttaacatcagattagttcaggttacttttttgtaaaagttaaagtagaggggacttctgtattatgctaactcaagtagactggaatctcctgtgttctttttttttttaaattggttttaattttttttaattggatctatcttcttccttaacatttcagttggagtatgtagcatttagcaccactggctcaatgcgctcacctaggtgagagtgtgaccaaatcttaaagcattagtgctattatcagttaccaccatttggggcttttatccttcatgggttatgatgttctcctgatgacacatttctctgag

SEQ ID NO: 2339 - DNA, 364 bp, Homo sapiens
accatgggtagagcatctgcaaaacaaatgccaaaattaaagattaaagcttctagtaatattagtcaaactgcttattaatagatacagaggaagaattgtaaactcctgactccagaggcaaattaaatgagtgcagtcaagcttacctttaaaattataagtaaacccaataatctatatttataaaaccttctgtataaaatatcatagagaaagatactgcaagaaatagcctatttctaataataaatatatatatatacacacaccagataaaccaataatctctaaatcagataattaacagccgaattttgtaaggaactaatatactttatgagcaaaggattacagataggac

SEQ ID NO: 2340 - DNA, 168 bp, Homo sapiens
agcgtggtcgcggcgaggtcggccgaggtacttgagcaggttcttccaatatagctatctgagctccccaaggactgaccagggacctttccagagctcaaggatttctggacctttctaccagttgtggaccatgagagggtgggagggcccagggagggctttcgt

SEQ ID NO: 2341 - DNA, 637 bp, Homo sapiens
  misc_feature 593: n = A,T,C or G
acagttatatgctttttaaatgcaatggccttattcagacttcagtccattttctgaattgactgtgtcagtttttcaccctttaaaataatgccatttaatgataaaatacatttttcaaaaattcagaaatgtagtaacatttaataaatgtgaccatgaaaaatatttgtaaggaggtgccaaatgacttagcactgttttccactctgtatctaaaaaaaaagttgcaatttgacagtaagcctatttaaaaaatattcttacattaattcatctcaaaaggttctattaatagtccttttgcaaaataccatatatataactgtgaacgttttttccagaattaatggaagaaaatgcatcctctgcacagatgaacattttctctctaaaactaatctttcatcacccagcatgtttttacaaaagcatgcaatataaaatacacataaaagcagctatcttaaacatgattttaatacaatattacctttgtagctgattcatcactgtctccagtttaatatgctgttacatacatgaagaagctccagtatcccttttctgattgactttttaaaaaaatcccngaataaaacagaagccagcctgtgacttctttaggcatttcagt

SEQ ID NO: 2342 - DNA, 510 bp, Homo sapiens
acagcacagttgtattgaagaaaaaaaggacccaactcttactttaggagtattaggcctggacttcccctgccccatgcaataaagcaagttttatatacactccccatatttttttctaacattttcttatataaatttaaatattttacaaaaaaaggcttttttcctccaaacatataaatctgagtgaaacatagattccccacccgagaacttgtttcttcactaaaatataaatgttgtctgatattaagggtaaatgtcttttgaccactggagatcactgaagtctgaattgcaccgtggagaaggcacttgtgttttctgaggtctccagcaagtatctcagtgagcactcatagaattgctgtctgtcctccagaacccgtgccaaggcctccgagtgcccagttactgaggcagctggggaaaaacgttgagtaaacatgattctacaattacggagataaaaaataaaaacagcatggactggttctaccctagaat

SEQ ID NO: 2343 - DNA, 468 bp, Homo sapiens
tttgcggactgcacttcagaaggagatcacaacgcgttatcaactggatccaaaatttatcacgagtattttgtatgagaataatgttatcactattgatctggttcaaaattcttctcaaaaaactcagaatgatgtggacatagctgatgtggcttattattttgaaaaagatgttaaaggtgaatccttgtttcattctaagaaaatggacctgacagtaaatggggaacaactggatctggatcctggtcaaactttaatttattatgttgatgaaaaagcacctgaattctcaatgcagggtctaaaagctggtgttattgctgttattgtggttgtggtgatagcagttgttgctggaattgttgtgctggttatttccagaaagaagagaatggcaaagtatgagaaggctgagataaaggagatgggtgagatgcatagggaactcaatgcataactata

SEQ ID NO: 2344 - DNA, 94 bp, Homo sapiens
  misc_feature 7, 78, 83: n = A,T,C or G
atctcantgttagtaattccagtgtcatactggaaaacacgatggaagaccatgctgctgaggcatccgggaagcctntaggngaaattagtgt

SEQ ID NO: 2345 - DNA, 222 bp, Homo sapiens
acaataaatagagtgctctccaatcatggtgaatcctttattacatgcatacgttacagactgtctatatccataatggtcacgttccccttgaattattccattgtcaatttgtggtggtgttggacaataaatttctctgcactctggcaacgggtcactccactggacagagctgcctgaaataagacaaaaactagaagtcgagccaaataatttgta

SEQ ID NO: 2346 - DNA, 325 bp, Homo sapiens
acaaagtgaaaattctacatggtgcatctttggcgcttcatgcatgattatttcaatgaacctcttcctggtcactcttaagatagatctgagtttttgactcgccagtcaagggctttggcgacactcaatgacataatattcttggaaaaagcagtagcatttctgacttttcatattcagctcggaggtgtattgtctcgggctcctgtgcagtcgagcgccacggctgctcattggatgatccaggatgggtccttggcaattttcgggttctcgggtccgaggatggccaggccgtgtgtgcttttcccagtgccgaggt

SEQ ID NO: 2347 - DNA, 415 bp, Homo sapiens
  misc_feature 343, 370: n = A,T,C or G
actgttatatgctgcaacatgaatgaaccctgaaaacccgctaagtgaaatcagacagacccaaaaagacaaatactgtatgattacacttatatgaggcccctagaataggcaaattcacacagacagagagcacagcaaagtttaccagtataacaaaggttaccaaagactagggggagagacaggtaggaagttatttttttatgaatacagagcgtctgtttgggatgacgaaaaagttctagaaatggatagtgtcgatggttgcacaacatagcaaatatactaaaagccgctgaatagaacatttcaaaagcatgaattttatctcaatatttanaaggaaaaataaatattcttagaaganacaatattaccatcataaatggaaaaccggggataataaaataca

SEQ ID NO: 2348 - DNA, 428 bp, Homo sapiens
  misc_feature 355, 363: n = A,T,C or G
acagacctgggtttggctgggcaaaattatataacttctttaagcctccatgtttcctcatctgtaaaatgaggataatagatagtatggacctgttgcaaggattaaacataatcagtgtaaagtgttggtcccatgcttgccacataagaaaatatttgtcaacagagtggtagttgtcattatcattgtctcagtttgcctgtaactagttgtgtgatctgagacaaacactaattttgaacttgagtttccccacatgtaaaatgaaagattgataatagaaagtaaatcaattttttctagcattaaaaatagtatgcatttaataaaaatcttattcttaatgatctancttacctncaacttgccctagtcactttggcgatcttgtctctaaatagaaccttgaaaacacttaaatgtgt

SEQ ID NO: 2349 - DNA, 490 bp, Homo sapiens
acaatcaggaacatattttaaaaccattaccattaaaataaatgaagatcataaatcacaatttagtttgttcttagtgtatatactcacattaaaatataaagaacatataccaaaaagagccaaaagtgtgcattttgctaaaacctggtatatacatattccattggcaaaaagcaatcaaaaatgacttaaaccaaaactaagttcctgtgatgtgtagtaaccattatattgtttgtatgaggtagtaactaaattattttggccatgtattaatactctaagtcaaaagaaatatgaaaaggatcataaaataaggccaacaaaagtaaaaattccaagagaaatttgaaccacttcactctatggaatgttacagttcttcagtgtgatcatatgaaatgtttagtgaggactctttaataatgctaattaattctttgtgcatactgtaattctgaccacaattgcagtattctatcatggt

SEQ ID NO: 2350 - DNA, 163 bp, Homo sapiens
  misc_feature 122: n = A,T,C or G
acggccagggctattggttgaatgagtaggctgatggtttcgataataactagtatggggataaggggtgtaggtgtgccttgtggtaagaagtgggctagggcatttttaatcttatagcnaaagcctataatcactgcgcccgctcataaggggatggcca

SEQ ID NO: 2351 - DNA, 143 bp, Homo sapiens
  misc_feature 65, 73: n = A,T,C or G
acaagctttttttttttttttttttttttttttttcttttttttttttttttttttttttttttnaaaacaancaaattttattaaaggaaaattttgcaggtttaaggtttgcaggtgaatttttgtaggtgaaaaggttta

SEQ ID NO: 2352 - DNA, 307 bp, Homo sapiens
acaaaacagtattaaagctcagtgttttgcatattgttagcatttacaaatatttttgctttagtatgaggaaagtaaggatgggcaaagaagtgatcaaaatagctattgctacaacattttcgaaaacaaagttggggctgtatttctttaaaaagataagcctctaaaaatgcttggcaaaaaaaatatagtgttaaaataggccagtgatattaatgagaaaatgaaagtatgtatcaggaataaagtgatattgcataggagtattgtatttttatgaattttatgccagttgtttacatgt

SEQ ID NO: 2353 - DNA, 544 bp, Homo sapiens
  misc_feature 483: n = A,T,C or G
acagacgaggtttcaccatgttggccaggatgatctcaatctcttgaccttgtgatccgccagcctcggcctcccaaagtgctggggttacaggcatgagccactgcgcctggccatcaacatcactttttaagtatcaactgaaatgatgatatgatttttatctttcattctgttgatgattttagttcttatcaagaacccaaggatattttatagaaatcctgaaatgcctactaattaatcataattactacagtttttggaacagttttataattttaaattattggaatcaaaaagtctatttacaccaaaatttaaagagaataatcaattcactcacatatcttatttttcctcctaagaatatataaccatgagaacagggttctagggtctgtcatattcacaaatatatcccagcgcctaacagtgttttttaaatttttatctttaattgacataataattgtgaatatntacgaggtataaaatattttgatccttgcatacattgtgaaatgatcagagtatagcatat

SEQ ID NO: 2354 - DNA, 484 bp, Homo sapiens
tgtgaaaaacaacacattttaaagattacgtgcttcttggtacggtaaggatataacctcccggggcaaagacaagccgattgccgatgtgttcttaatttgcttttcccttgtgagtcctgcatcatttgaaaatgtccgtgcaaagtggtatcctgaggtgcggcaccactgtcccaacactcccatcatcctagtgggaactaaacttgatcttagggatgataaagacacgatcgagaaactgaaggagaagaagctgactcccatcacctatccgcagggtctagccatggctaaggagattggtgctgtaaaatacctggagtgctcggcgctcacacagcgaggcctcaagacagtgtttgacgaagcgatccgagcagtcctctgcccgcctcccgtgaagaagaggaagagaaaatgcctgctgttgtaaatgtctcagcccctcgttcttggtcctgtcccttggaacctttgt

SEQ ID NO: 2355 - DNA, 410 bp, Homo sapiens
acacacaaatatacatacacaagaattctgcccacttttttaaaaaagtagtatactttctgtattaccaacagatagctagacagatatgtgaaacttgtgccttttaagcaaatacattaacattgggggttttttaatacttctgtatctttaatatgtgtgaaaatgttacatattaaatacagccggtgtgtgatctatacaattgttgtgcaaggtctatatgaaagtctcaaggtggcagaattggtcagatttttccattttcctgttttccattttaacactgacagtcaagttgcctaaagtgttgaacaaatactgacatgtaaagggagtttcactctatgtctttgtgaaggaggaccttaaagagattttttttctgtattatacgttgatacagt

SEQ ID NO: 2356 - DNA, 243 bp, Homo sapiens
  misc_feature 174: n = A,T,C or G
actcctatagatatttcactcaaaagcttttcttgaaataatgaaatcagaacaaagaatggacagaattggggagtgaataatgtggttcttatgcaggaaaagtgttccagcacagaatacagccagtgcaaatgccctgggatagcaatgcactaaacatgtttaaagaantgcaatgagacagtgtgaccaaaagagaacgtgagtggagaaaatggcagagacaaattaggagaagca

SEQ ID NO: 2357 - DNA, 466 bp, Homo sapiens
  misc_feature 122, 124, 290, 291, 440, 453: n = A,T,C or G
actttatcacccatggggtgttaaaaatacagtttaaaaatacagtctttcacatgtcctacaaagtgctagaaaaaaattttaaaaattgacggggcgcaggggctgatgcctgtcatccnancactttgggtggcactggtgggcagatcacttaaggccaggagttcgagaccagtctggaacacagtgaaatcctgtctctactaaaaatacaaaaattagccaggcgtgatggcacatgtctgtaatcccagctactggggaggctgaagcacgagaatcgcttnngcctgggagatagaggttgcggtgagtgaagatcacactgctacactccagcctgggtgagagagtgagactctgtctcaaacaacaacaacaacaacaacaacaaccacaaaacaaacaaaaacccctgattcctggagatcctgatnccataggtgtggnctctgcaagcaat

SEQ ID NO: 2358 - DNA, 517 bp, Homo sapiens
  misc_feature 481, 482: n = A,T,C or G
acattttgtttcttaaatggatggttcgtggatagaaagctttcacagtcagacttccaaaagaaagcagcccagaaaccctgtagagggtttgtgaagaattgctttagagaagaaacatttcctggtgtgcttttttcgagcaatataacttggtggggggaaacaggcttattttaggttaaaagtgaaaaacgtaattcagttgttacaagaaaccacaaacatacaaggttgtcagagatttcaaattgagaactagaaaattatttcctttccagttctctcagtccaaatacagctttcctcacaactgactttgggccctgtaggtgcggtggaatgatcccggtgcacaatattccttagttgacaaagagaagctgccaagattcccattttcaattgaccaggaaggagatatttacgtgactcagcccttggaccgagaagaaaaggatgcagtgagtaaaagagaagnntttcacaggcgacaagacaaagtcctatgcccatc

SEQ ID NO: 2359 - DNA, 381 bp, Homo sapiens
actatgaatagcttcttgctttatgactttaggattaacttgtaaaaaacatatcctgaactgagatatgcaaaatactcattttcaagttatggaaatgtgtttgtggcatataggactgtggggtctgtgtgtgtagcgagagtgtgtagccactattataactggaatttaatttacattcataaactactatatttcccatcttgcaaatcattttatgtctcatctgtttttcctttcggttatatctttggttttgaataccaacatttaaaatgatggtattttatcttttaaacttaaaaattatttaatacagctatatggaccttataaaattgatttcttatttattattagacattactactaaaaggt

SEQ ID NO: 2360 - DNA, 101 bp, Homo sapiens
  misc_feature 24, 67: n = A,T,C or G
ggcaggtacagaagaaacctattnccaaaaaaggtcctttcagtggtagactcggggagaacttggnggcccctttgagatgccaggtttcttttttatct

SEQ ID NO: 2361 - DNA, 505 bp, Homo sapiens
  misc_feature 36, 40, 42, 103, 116, 180, 206, 246, 270, 297, 302, 322,324, 378, 380, 390: n = A,T,C or G
caagcttttttttttttttttttttttttttttttnggananacaggatctcatcatgttgcccaggctggtctggaactcctgggttcaatctgcccacctnagcctcccaaagngctatattacaagcgtgagccaccgcacccagcccactttttttaactatttaaaactaatganacattaaggttagccaataacaaatnttccccaaaaaacactttagtcaataaaaatataaatttnggtattatttccccatcattaaanaataggtattcctttcccccagctttntacanatgacattttcaaggtaagngngaaaaaaaattccatttattcaagactaatatacaatggaccaaacattttcananacttctctgnattaaatctcattacttcacactttaaaatgaacctaactaaatgactactaaaaagcgaagttgaaaaaataaacatctaataaatgaaacatgacagtttttttgggaggggg

SEQ ID NO: 2362 - DNA, 506 bp, Homo sapiens
  misc_feature 473: n = A,T,C or G
ggtgagcggtggtggtttattcttccgtggagttaagggctccgtggacatctcaggtcttcagggtcttccatctggaactatataaagttcagaaaacatgtctcgaagatatgactccaggaccactatattttctccagaaggtcgcttataccaagttgaatatgccatggaagctattggacatgcaggcacctgtttgggaattttagcaaatgatggtgttttgcttgcagcagagagacgcaacatccacaagcttcttgatgaagtctttttttctgaaaaaatttataaactcaatgaggacatggcttgcagtgtggcaggcataacttctgatgctaatgttctgactaatgaactaaggctcattgctcaaaggtatttattacagtatcaggagccaataccttgtgagcagttggttacagcgctgtgtgatatcaaacaagcttatacacaatttngaggaaaacgtccctttggtgtttcattgctgt

SEQ ID NO: 2363 - DNA, 335 bp, Homo sapiens
  misc_feature 164, 246, 248, 308, 310: n = A,T,C or G
actccagcctgggcgacagagcaagactccacctcaaaaaagaaatatttagcaaatattaaaggacaagagggaatatctgtttaaaaaattataatgcacgttagatgaaaagtaataggatgagatggttgttgctgaaatagcacttgctatataaattnaaatattccttttcaaattcagcttctcagaggtttgacttcagatgcttgagcactttcaacattatctttgcctttatantnctttatgcggataaacacaactgctaaaattataccaatcaccagaagggtggtcagcantntaccaactgccatgcccacagtggg

SEQ ID NO: 2364 - DNA, 512 bp, Homo sapiens
actgggctgttcagggacagaatgtgctacacggataccccaaggacatctacagctcctttggcttccctagaactgtgaagcatatcgatgctgctctttctgaggaaaacactggaaaaacctacttctttgttgctaacaaatactggaggtatgatgaatataaacgatctatggatccaggttatcccaaaatgatagcacatgactttcctggaattggccacaaagttgatgcagttttcatgaaagatggatttttctatttctttcatggaacaagacaatacaaatttgatcctaaaacgaagagaattttgactctccagaaagctaatagctggttcaactgcaggaaaaattgaacattactaatttgaatggaaaacacatggtgtgagtccaaaggaggtgttttcctgaagaactgtctattttctcagtcatttttaacctctagagtcactgatacacagaatataatcttatttatacctcagtttgcatat

SEQ ID NO: 2365 - DNA, 273 bp, Homo sapiens
  misc_feature 120, 195, 266: n = A,T,C or G
acatgtaaaggaaaatggataaaactacagctgctgcttttacatgtggaagaacaatgatactatttaccatggcaagtggtaggaaaactgttgtccttggacataattgttttttantgagttgcttttgatacccatatcaatttataattctttgtttgaaatgaagtctttacatggttcattgaaganatagattggttatttcatactgataagcattctactcttatttgttatgcattttccttagtgatatattntacttgt

SEQ ID NO: 2366 - DNA, 335 bp, Homo sapiens
  misc_feature 326, 330: n = A,T,C or G
acgatgccttcctgacctcaccggcctccccaagggtgccggcactctgggtggactcacggctgctgggccccacgtcaaaggtcaagtgagacgtaggtcaagtcctacgtcggggcccagacatcctggggtcctggtctgtcagacaggctgccctagagccccacccagtccgggggactgggagcagttccaagaccaccccacccctttttgtaaatcttgttcattgtaaatcaaatacagcgtctttttcactccaaaaaaaaaaaaactgttcctgttggccgagtggagactggtgttctcaaacccggtatggnggtnacctt

SEQ ID NO: 2367 - DNA, 414 bp, Homo sapiens
acattcatctgaatatacatggtcaggtaacagtggaattcacatcaagaattttttaaaaaaagaaaccagttcatgacatgtcccattcttttaagacaactaaaacagtaagagctcaatgtcataagtatttataagcaactcttaattataaaatccaaaggaaaaattcttaacataactggctttagtatgattaaaggtttctcatttgcatatatgtttcagagtatttaaaaagaatgccaagaaaaatcatttttaaattttgcaataattttactctatatacattgataccaatcatttaaccctgaaaacacagtcttcactaacacaatgtaaaaaaattttttgacagtaaatgaccagaaatattgcattaccataaagctacaaagaggctcatgc

SEQ ID NO: 2368 - DNA, 80 bp, Homo sapiens
actcctaataaaatacttaataaatagcatataaaatcaaagtttaaaagtaaatgatggcagtttgccatactaaaaag

SEQ ID NO: 2369 - DNA, 358 bp, Homo sapiens
  misc_feature 35, 122, 212: n = A,T,C or G
acaagctttttttttttttttttttttttttttgnttacacttacattttttattctctttttctaattaaatgcacatactaagaagtaattaaatcttcaaataattgttgttacatatnttaaatctgctaaacattgagaaaaatatagtatatataattacataaaaattttatttaatttaaaatcacgtttaaattatatcttanctatttacatacatgtttagtaactagtttacaattgtagctgatacttaacaaggataaatagggctattcaaattttgttaaatatgccttaaaattgaatccaagtcacattactataataaaattagcattatcattgatgt

SEQ ID NO: 2370 - DNA, 246 bp, Homo sapiens
acacagacaaatttatgcgaccagggcagaggctgtacatgcatatatttaataatgaaacaattcatcaatagcaaaaagaaagtagaaaaattcgtaagacctcagggctgtggaagagaatgggacatcaaggaaaaaagatatatatagcaaccaacccagaaggctgcatgatgagtgaagcaaaggcaagtttggctaagatagtattatatgctctgaaaagagaatggctggataggt

SEQ ID NO: 2371 - DNA, 497 bp, Homo sapiens
acaaactataaaaatgttaacactgaagttttcaacagaagtctattaagatgccttagaaaaattaaacaacagcaagtcatttactgctatgaggttaatacataaagaaacattcacacattttactgaaattttcagtaaataactttagccataacacttataattaaaagttcaaaagttgtgtgtggctctacagcaattataatttgcaatgaaaacactaagccaaatctttttgagctgatcagaacaatcttagctacaaaattggctgaaatttgcaaaccttaaaaagaacaccaattgtgaatggaataggtatcataacttagcttaaagtggaagatggtaaaaactcgatacttaagtctgaattgcacaaggaaaatattaggggaaaaaacactcagctattactgatagctattactttaaaaaaatattagatcattcttatattaaaaacatgaaatgaatccaagccagacagt

SEQ ID NO: 2372 - DNA, 465 bp, Homo sapiens
  misc_feature 456: n = A,T,C or G
actcggtgtctttagcttttcattctgctctgggtctgatcttttatcaccaacaagagtggaattttgctttggcatcacatggtagtaagacggggcatatttggaggagctacaacctcttttctttctagattcctgaatttcttcacagagctgctcaaagtcttcatcaagttcttctttaattatggcataggcagtatctcttaaagcacaggctctatgcctaataagacgatctccaggatctctatctggattgtattctaaggcattactacagattagatcaatatctctcaaatagtctttcacagtcagatacttgtgtagatcaattttactgattacagatgaaaggtccattggttgctttattacagtgacataatcaggaacctaaaattcaagcaaatgatcaaatcacaaaattaactctaaacataacatgtnagtcaagtt

SEQ ID NO: 2373 - DNA, 570 bp, Homo sapiens
  misc_feature 494, 495, 551: n = A,T,C or G
gtgaaataaaataaacattatgtttacatatatcccacatgcatttgtgagataaaataaacattatgtttacatatatcccacatgcatgtgaaatgtataattacatcttaggaatccaaaatggtctgcagagagtgagcggaggcaccagatcaatgttggttctttgcactggtgagattctgcctgatgaatattaaagatatcctgctttctgagaactctatcaccagatggcagttgggatatgggaggaactaaagcatcctgttttgtatctgtccagatcattatttctgtctcttgttttttcttcctggttcaggatacttttttaaggggttgagaattgaagattttccaaaagcgttcatgaatttagagcattccacccaatataataaaacctgttaagaatgtcagtctttgttcaaacatctgtttgttctatctccagtcattaaatcagtgctgctgcatgacactcttanntcctgactttttatatccagtcataaagttgactttcagcacaaaagatacttatnaacaaataaaaaattttta

SEQ ID NO: 2374 - DNA, 326 bp, Homo sapiens
  misc_feature 276: n = A,T,C or G
accccttcctcaggtgcccaaaccacttttaatttttattttatagaacaattaaaacaccgaagtatgactttctcccagtgaaagacatgaattaaaatggtaatctggccgggtgcagtggctcacgcctataatcccagcactgtgggaggccgaggcaggcagatcacttgaggtcaggagttcaagaccagcctggccaacatggtgaaactccctctctactaaaaatacaaaaattagccgggtatggtggtgcatgcctgtaatccnagctactcgggaggctgaggcaggagaattgtttgaatctgggggggtgg

SEQ ID NO: 2375 - DNA, 417 bp, Homo sapiens
gcttggagggtgatcactctacacccccaagtgcatatgggtctgtcaaagcctatactaactttgatgctgagcgggatgctttgaacattgaaacagccatcaagaccaaaggtgtggatgaggtcaccattgtcaacattttgaccaaccgcagcaatgcacagagacaggatattgccttcgcctaccagagaaggaccaaaaaggaacttgcatcagcactgaagtcagccttatctggccacctggagacggtgattttgggcctattgaagacacctgctcagtatgacgcttctgagctaaaagcttccatgaaggggctgggaaccgacgaggactctctcattgagatcatctgctccagaaccaaccaggagctgcaggaaattaacagagtctacaaggaaatgt

SEQ ID NO: 2376 - DNA, 398 bp, Homo sapiens
actggcaacctaaacttaacatataaaagaagcacttcataactaataaagtattaaaaactttaaaacatgtcatttaaacaatcccaccatcaggaaaacatgctttgaaccattttcaagaagtgatcatgtgaatgcattaatttacttgttttaaattttttgttgttgttgttaatgcttatatattggaccaatggaacacatttgtttggctggggttcagacacacagtttgtggtgtgaaagacatttttctttcctctgcacaataccggaggacccacagagcaatccaattcctaattctgaccttattaataccatcttccagttgaccaagcatagtaatgaagatattcttagagctttcgcagaaagcctgaagcttaagg

SEQ ID NO: 2377 - DNA, 447 bp, Homo sapiens
cttattattttgaaaaagatgttaaaggtgaatccttgtttcattctaagaaaatggacctgacagtaaatggggaacaactggatctggatcctggtcaaactttaatttattatgttgatgaaaaagcacctgaattctcaatgcagggtctaaaagctggtgttattgctgttattgtggttgtggtgatagcagttgttgctggaattgttgtgctggttatttccagaaagaagagaatggcaaagtatgagaaggctgagataaaggagatgggtgagatgcatagggaactcaatgcataactatataatttgaagattatagaagaagggaaatagcaaatggacacaaattacaaatgtgtgtgcgtgggacgaagacatctttgaaggtcatgagtttgttagtttaacatcatatatttgtaatagtgaaacctgt

SEQ ID NO: 2378 - DNA, 305 bp, Homo sapiens
ctgggggtgaggaggacaagaaggagaggaaaatgtttccttgtgcctgctcctgtacttgtcctcagcttgggcttcttcctcctccatcacctgaaacactggacctgggggtagccccgccccagccctcagtcacccccacttcccacttgcagtcttgtagctagaacttccctaagcctatacgtttctgtggagtaaatattgcgattggggggaaagagggagcaacggcccatagccttggggttggacatctctagtgtagctgccacattgatttttctataatcacttggggt

SEQ ID NO: 2379 - DNA, 620 bp, Homo sapiens
  misc_feature 169, 456, 487, 488, 602: n = A,T,C or G
actactacaaacgggagatcctggaacgggtggatggccggcgactcgtctacaagtttggcaaaaactcaagcggctggaaggaggaagaggttctccagagtcggaactgagggttggaactatacccgggaccaaactcacggaccactcgaggcctgcaaacctncctgggaggacaggcaggccagatggcccctccactggggaatgctcccagctgtgctgtggagagaagctgatgttttggtgtattgtcagccatcgtcctgggactcggagactatggcctcgcctccccgccctcctcttggaattacaagccctggggtttgaagctgactttatagctgcaagtgtatctccttttatctggtgcctcctcaaacccagtctcagacactaaatgcagacaacaccttcctcctgcagacacctggactgagccaaggaggnctggggaggccctaggggagcaccgtgatgnnggggacagagcaggggctccagcaccttctttctggactggcgttcacctccctgctcagtgcttgggctccacgggcaggggtcagagcactccctaatttatgtgctatatnaatatgtcagatgtacct

SEQ ID NO: 2380 - DNA, 189 bp, Homo sapiens
  misc_feature 34, 137, 171, 173: n = A,T,C or G
acaagcttttttttttttttttttttttttttgnatctgtaatagtttattttaaagactttacatttacaagtagaaacaacatgtgttatctgtgggtaaggtagagcaggaactctaatccaagggtggggganatcagttggttccttcacagaaaataagcctgtngngtgggcatcttgcttg

SEQ ID NO: 2381 - DNA, 419 bp, Homo sapiens
acacagtatgtataacaatgcatactatggtgtggagttaattccaattaccatattttatatttattggtcacaacagcatacattttatgctccaaaatacatggatctgacaaaatggttacatttaatgttcttttaaagaaagatgaactaaatttaagaagaattggtttttcctaatatctcattttcaaattactgatacaaatttgccagagaaacaattacatgttttacctaacatcaaataatctccagtttctaagacagatgcatttcttgttcaatttccaaaagtaaataaaggctttctaactgaaaacatttgcatccctagctctctaaagtaattaaaaagaaaattacaaaaaatgacctctaagcttctgaacagcccacttagttacataaagtaa

SEQ ID NO: 2382 - DNA, 538 bp, Homo sapiens
acttcagttggtgcacaaaatactgtcatttgctcaaagctggctgccaaatgtttggtgatgaaggcagaaatgaatggctcaaaacttgggagaagagcaaaacctgaaggggccctccagaacaatgatgggctttatgatcctgactgcgatgagagcgggctctttaaggccaagcagtgcaacggcacctccatgtgctggtgtgtgaacactgctggggtcagaagaacagacaaggacactgaaataacctgctctgagcgagtgagaacctactggatcatcattgaactaaaacacaaagcaagagaaaaaccttatgatagtaaaagtttgcggactgcacttcagaaggagatcacaacgcgttatcaactggatccaaaatttatcacgagtattttgtatgagaataatgttatcactattgatctggttcaaaattcttctcaaaaaactcagaatgatgtggacatagctgatgtggcttattattttgaaaaagatgttaaaggtgaatccttgtttcatt

SEQ ID NO: 2383 - DNA, 430 bp, Homo sapiens
  misc_feature 385, 399: n = A,T,C or G
gaaaaccggtgaatctgggcttatgggatacagctggacaagaagattatgacagattacgccccctatcctatccgcaaacagatgtgttcttaatttgcttttcccttgtgagtcctgcatcatttgaaaatgtccgtgcaaagtggtatcctgaggtgcggcaccactgtcccaacactcccatcatcctagtgggaactaaacttgatcttagggatgataaagacacgatcgagaaactgaaggagaagaagctgactcccatcacctatccgcagggtctagccatggctaaggagattggtgctgtaaaatacctggagtgctcggcgctcacacagcgaggcctcaagacagtgtttgacgaagcgatccgagcagncctctgcccgcctnccgtgaagaagaggaagagaaaatgcctgct

SEQ ID NO: 2384 - DNA, 530 bp, Homo sapiens
  misc_feature 33, 93, 273, 293, 445, 450, 465, 492, 496, 508: n = A,T,C or G
acaagcttttttttttttttttttttttttttnggcttgaaaatttttatttaacctcagcaaatattggaaatagaaaaatgaattctgcanaatttcacaaataaattttccaatttccactaacaaatgttatcattcaatggctaagcagttataatgctatgaacattcaccacaatgaatgtgctgaaatagaaaacaggcaaagagacattaaaatattacttacaacagcattattacaacatattttctttaaaattccaacgnggatttcatcacttcaaaanatatacagcatttccattatatttgcaaacttaaccttatacatcttttaaaatcttgaaaattttttaagctgtctaaaaagcacttagcaaagtcgataagtctacctaatggaatactatccaccccggtataaatttcgttttagganaaggnggctgtaaacactcntcatcacacaacatgcatagcctctgntgancttcccttcttntgaatgcgacgccactgcaatt

SEQ ID NO: 2385 - DNA, 341 bp, Homo sapiens
acatgttagtccctgggatggcaggggctgagggcatcacccctgctgctgtcttcctggcctccttggcagccttcatagcttgaagcttccggttgtagctcttccgcacacacacgaaggccatggtcatgatcacaaggaccagcagcaaagccactcccaatcctatgatgacactgatgagctgtttcgacaggtctgactcctggctctcctgggagcccagcaccaccagccccagctgcagcagctgcgtcagcgagtcctgatcattccggatcatcacactcagctcatcaagggtcagggctgacccattggggaagacaagtaggcat

SEQ ID NO: 2386 - DNA, 381 bp, Homo sapiens
actatgaatagcttcttgctttatgactttaggattaacttgtaaaaaacatatcctgaactgagatatgcaaaatactcattttcaagttatggaaatgtgtttgtggcatataggactgtggggtctgtgtgtgtagtgagagtgtgtagccactattataactggaatttaatttacattcataaactactatatttcccatcttgcaaatcattttatgtctcatctgtttttcctttcggttatatctttggttttgaataccaacatttaaaatgatggtattttatcttttaaacttaaaaattatttaatacagctatatggaccttataaaattgatttcttatttattattagacattactactaaaaggt

SEQ ID NO: 2387 - DNA, 180 bp, Homo sapiens
cgagcgtctcgcaggccgtaggaggaagatggcggtggagtcgcgcgttacccaggaggaaattaagaaggagccagagaaaccgatcgaccgcgagaagacatgcccactgttgctacgggtcttcaccaccaataacggccgccaccaccgaatggacgagttctcccggggaaatgt

SEQ ID NO: 2388 - DNA, 531 bp, Homo sapiens
acagatcaactcagttcttgcaggtgtaggcagaactgagtctttaattgaatcaaaagtctttaattgaatttactggtgatgaaacattaaattctcaaccaaacttagatcttcagaactgtatgagattctcattttttacttacctaaatctgttattaccaaattgcaaaagttgaaactcctataaaagagtataggcatttttaattaggaatctaacaaaagtaaaacttttcataataatcttcagtcaaaacactagttaaaaatggtaacatttcagccatgctcttgtagatcacacagacaaaaaaaggtaacacattacatgaacaatatttctctccttcctgtataaaaataaaaaagaaaacaatattagttctatgcaacatattttaataattcaaggaaagcaaaaatagcacaagaaattcatagaaccatattcttatttttttttaatatagagaatacgggcaagaaaattacacacctcaattgcttacatttctttcatgaatt

SEQ ID NO: 2389 - DNA, 315 bp, Homo sapiens
acagatcattattttccagaaaaagtgacccatgaagttggctggggcgggtgtggagtgttatgtcatgggacggaccttgggatgagggcgttaatccatgggcccctctgagatcactttaaacattttggtaagactgcccaggctgatgaagggctggagcgtgtgttaaaaacaagggctagtgttggttaaaagggatctttggcaagtgggaaactgctcgccactgcagaatttcttcagaccaaggaagggactgaaacggacttggaaaactaaagcaaaaccatgactgccgggatggtctcg

SEQ ID NO: 2390 - DNA, 457 bp, Homo sapiens
  misc_feature 456: n = A,T,C or G
acagacaggacagaatgaaactcctgcgggtctttggcctgaaagttgggaatggttgggggagagaagggcagcagcttattggtggtcttttcaccattggcagaaacagtgagagctgtgtggtgcagaaatccagaaatgaggtgtagggaattttgcctgccttcctgcagacctgagctggctttggaatgaggttaaagtgtcagggacgttgcctgagcccaaatgtgtagtgtggtctgggcaggcagacctttaggttttgctgcttagtcctgaggaagtggccactcttgtggcaggtgtagtatctggggcgagtgttgggggtaaaagcccaccctacagaaagtggaacagcccggagcctgatgtgaaaggaccacgggtgttgtaagctgggacacggaagccaaactggaatcaaacgccgactgtaaattgtatctna

SEQ ID NO: 2391 - DNA, 412 bp, Homo sapiens
acctccaatgagagtatatgaagtagcaactttttatacaatgtataatcgaaagccagttggaaagtatcacattcaggtctgcactactacaccctgcatgcttcgaaactctgacagcatactggagtccattcagaaaaagcttggaataaaggttggggagactacacctgacaaacttttcactcttatagaagtggaatgtttaggggcctgtgtgaacgcaccaatggttcaaataaatgacaattactatgaggatttgacagctaaggatattgaagaaattattgatgagctcaaggctggcaaaatcccaaaaccagggccaaggagtggacgcttctcttgtgagccagctggaggtcttacctctttgactgaaccacccaagggacctggatttggt

SEQ ID NO: 2392 - DNA, 456 bp, Homo sapiens
acgatcttggctcagtgcaacctccgcctcctgggttcaagcgattctcgtgcctcagcctccggagtagctgggattgcaggcacccgccaccacgcctggctaatttttgtatttttagtagagacggggtttcaccatgttggtcaggctggtctcgaactcctgacctcaggtgatccaccttggcctccgaaagtgctgggattacaggcgtgagccaccagccaggccaagctattcttttaaagtaagcttcctgacgacatgaaataattgggggttttgttgtttagttacattaggctttgctatatccccaggccaaatagcatgtgacacaggacagccatagtatagtgtgtcactcgtggttggtgtcctttcatgcttctgccctgtcaaaggtccctatttgaaatgtgttataatacaaacaaggaagcacattgtgta

SEQ ID NO: 2393 - DNA, 319 bp, Homo sapiens
cttggattcaattttaaggcatatttaacaaaatttgaatagccctatttatccttgttaagtatcagctacaactgtaaactagttactaaacatgtatgtaaatagctaagatataatttaaacgtgatttttaaattaaataaaatttttatgtaattatatatactatatttttctcaatgtttagcagatttaagatatgtaacaacaattatttgaagatttaattacttcttagtatgtgcatttaattagaaaaagagaataaaaaatgtaagtggaaaaaaaaaaaaaaaaaaaaaaaaaaaaagcttgt

SEQ ID NO: 2394 - DNA, 276 bp, Homo sapiens
acaaacaaaaattcggctttcaaatgttattttgtttacttttgaatatgagtatttctgatatctggaattatgtctcaaagaaaattatttaattggcatattttcttctttaaagaccttagctctaagtagatgagaggtgaggggtgtctgagtgggtgtggcttgtgggaaatgatgtggataaaaaatattagaccaatgtaaccattccaatctactgacttgaaaccaagatttgctaacttttaataaaacacaacttattatggt

SEQ ID NO: 2395 - DNA, 299 bp, Homo sapiens
ttttttttttttttggtgtttgtagcgccactttactgccaatagctgacattgccctgggttaggggagaataaataaaatctgtggcatcagacaggtattaccgaggcgaagagtggactgggctttcgtgggcacttaccctgggaagggggtatgaggtggctggagaagtgttcatggagagtgtctctctcctgcccccaaggccacggaatcttctattccttctttgtacccaaagggcaaagtggaggccagggtctctttgctaaggagctaagtaggggaaagaggc

SEQ ID NO: 2396 - DNA, 363 bp, Homo sapiens
aaagaagttgattccttcattcacttcgccattcattcatacttccgtccatccattcagaaagcatttattaagaatttactcaggcatgatggcccatacttgtaatcccagctattgggaaggatgagatgggaggatggcttgaggccagaggtttgagaccgaccagccagggcaacacagtgagaccccttcccaaaaaaaaaaaaaaaaaaagagaaagagagtgtgtgattagaagctaaataggaaagttttgagcttcaagtcagtgaggagtaaaaaagatttttaaaaagcaaagaaaacaaaatataagggaaaaatatgagaaaaataaaaataaaaagagaataatag

SEQ ID NO: 2397 - DNA, 413 bp, Homo sapiens
acaaagattggtagcttttatatttttttaaaaatgctatactaagagaaaaaacaaaagaccacaacaatattccaaattataggttgagagaatgtgactatgaaggaagtattctaaccaactaaaaaaaatattgaaaccacttttgattgaagcaaaatgaataatgctagatttaaaaacagtgtgaaatcacactttggtctgtaaacatatttagctttgcttttcattcagatgtatacataaacttatttaaaatgtcatttaagtgaaccattccaaggcataataaaaaaagaggtagcaaatgaaaattaaagcatttattttggtagttcttcaataatgatgcgagaaactgaattccatccagtagaagcatctccttttgggcaatctgaacaagt

SEQ ID NO: 2398 - DNA, 367 bp, Homo sapiens; identical to SEQ ID NO: 1960

SEQ ID NO: 2399 - DNA, 191 bp, Homo sapiens
ctcaagcactaaagaaagtatttgcccaaaatgaagaaatacaagaaatggctcagaataagttcatcatgctaaaccttatgcatgaaaccactgataagaatttatcacctgatgggcaatatgtgcctagaatcatgtttgtagacccttctttaacagttagagctgacatagctggaagatactct

SEQ ID NO: 2400 - DNA, 235 bp, Homo sapiens
acagagtcttttgcttcctcccacccctagggggaaaaactgctttgtgctttgggaagttgtctctgaaacccggggacagaggacgcaggacagactaggagggagccgggaggatgggctgcagctgtggaggagggtttcagaggagagaggtcggagagcagaggcctgagaagccagaggcaggtggagagagggtggaaagtgagcagcgggctgggctggagccgca

SEQ ID NO: 2401 - DNA, 167 bp, Homo sapiens
  misc_feature 50, 101, 143, 159: n = A,T,C or G
acaagctttttttttttttttttttttttttttttctttttttttttttnggcagctcactccaggtttatttcagggcagtttgggggtgggggacaaanacccccctccagctcctaaactgggtcacttttctcccaggngaaggggaccatcctnatgggatc

SEQ ID NO: 2402 - DNA, 423 bp, Homo sapiens
caaaacctaacttgcgcagaaaacaagatgagattggcatggctttatttgttttttttgttttgttttggtttttttttttttttggcttgactcaggatttaaaaactggaacggtgaaggtgacagcagtcggttggagcgagcatcccccaaagttcacaatgtggccgaggactttgattgcacattgttgtttttttaatagtcattccaaatatgagatgcgttgttacaggaagtcccttgccatcctaaaagccaccccacttctctctaaggagaatggcccagtcctctcccaagtccacacaggggaggtgatagcattgctttcgtgtaaattatgtaatgcaaaatttttttaattttcgccttaatacttttttattttgttttattttgaatgatgagccttcgtgc

SEQ ID NO: 2403 - DNA, 348 bp, Homo sapiens
acaagaaccaagtgaagagggaaaattgtaagtgctgtgaaacttaaatcctggtgttttttcccattgacaactaaaattgatggtgatcttcatgaccagttgatttctattggttcttctagagtaacattgtgtgtggtcagatcaatacgtaatatcatgttggtagtgtcttcattaaaaggaagcgaatttttatttccgttatacgttagagtaactgcattgacaggagtagttcctttcccccatacatgaagggatccaagcctcgtttcacttttatttatgtaacctctcttcaatatagtgcttgttaaggtggtctggtttaaattaaattgt

SEQ ID NO: 2404 - DNA, 166 bp, Homo sapiens
acggatgctacttgtccaatgatggtaaaagggtagcttactggttgtcctccgattcaggttagaatgaggaggtctgtggctaggagtcaataaagtgattggcttagtgggcgaaatattatgctttgttgtttggatatatggaggatggggattattgcta

SEQ ID NO: 2405 - DNA, 268 bp, Homo sapiens
acattgattagttagggtggggcgggaacaaatcacaatggtggaatgtcatcagttaaggctatgtttacttcttttgtggatcttcagttacttcaggccacgtggatgtatacgtgcaagtcacaggggatgcgatggcttggcttgggctcagaggcctgacattcctgccttcttatattaataagaaaaataaaacaaaatagtgttgaagtcttggggcggtgaaaatttgtgggggttggtgtggagagagaatgggcga

SEQ ID NO: 2406 - DNA, 520 bp, Homo sapiens
  misc_feature 76, 97, 112, 139, 152, 160, 204, 244, 248, 299, 369, 374,400, 440, 450, 475, 483: n = A,T,C or G
gtacaagcttttttttttttttttttttttttttttttttttacagcttataacacaacttttattaaaaaagttntacataacatagcatcaactnttttcaagaacaatnttaaacccgataagcaacaaaaaccanactaacaaaatgngtaacaanaaactaatgacccttctaaaatcaaacattcaattatctacaangtctttttaaaaacggggaaaactccttggtttacaggcncatnatattgaatataaagctgcaatagcaattttatacaattaccactctgaanaaactgaatcattaaaacagtaattaccgagttcacaaatttaaaacatttcacataattttaaattatngggtntacactgaagtctgagtttcaaaagngattttttttttcccacaaaagtttcaacacttaagctanaactttcagngttaactttgccctaaaaagttaanacatattntgataatcataacagccacatgatttctgatgctatc

SEQ ID NO: 2407 - DNA, 212 bp, Homo sapiens
taccatcagaggaaataaatcttagtattcggtgtgatagagactaattcatttcttttgatgaagtcccactctttgagtgactttgaagggggagacaaaatgtcaagaaggagtcctgcaggaacaagtgcttaaggtggtgtttaatacagcagggagccaagatacagtagtaggacacagtaaagaatgtggagtgtgtagataca

SEQ ID NO: 2408 - DNA, 316 bp, Homo sapiens
  misc_feature 173, 279, 280, 300: n = A,T,C or G
gtcaactgtcatttttagattgaggataactataacattactgaatggattattattcttcagtgcgatacactctgatattcagccttgccctgagttaatcaaatcactggagaacaaaagcgaataacagcaggtctctcttttttattccaatttcttacatttattgncaatgatgaattcagatgccagcggcctgcctagaaagccactcttaagcaacaaggagtctgccaatccacttaaaaaacaaaccacaagagaaaaaaatccaanncctctatgttaatgaagcancaactgtggcccccta

SEQ ID NO: 2409 - DNA, 507 bp, Homo sapiens
  misc_feature 68, 144, 261, 294, 307, 312, 351, 403, 418, 436, 455, 456,485, 486, 487: n = A,T,C or G
gcttttttttttttttttttttttttgaacataaacagggttagctgaagcagctttattgcaatctnttcaagttagcatattacagtttaaatatttatgcctgtaaagatctgcataatctacaatacagagttatttcanaagcagttgacttaactagttgagaacaaaaacaacaaacttcaacgcaaagctataataattatctgaaacttatttacaattaaacatttagggtcctgatttacaaaactcagngcctttcatgatttattgatgagttttataganaaagtaagcagtntgtanaatattccccaggtaaaatctggagtgaatggcttttanaggaaagtctatcagtatgcttaactaaaaactaaagagtgacaaaactgtntacagcagcaatcanaataacaggccacaaganaagaacgccatttttgacnntatcctttgtatgtataggaagaaaaatnnntgccaccccccacccctgcc

SEQ ID NO: 2410 - DNA, 428 bp, Homo sapiens
acaaactaaaattatgggagaagaaactatgagtgaaacgatgagaaaaacctaatgcatgatgtagaactgagtggtgttaatagcagagcactggagggaagggccacaaaactcttcaccccaaggtctagaatcattctagaatcatcctacaagcctagttttcatgagattcagccctattttatttcttgctcttggaattatatgaaattacgaatttctgtgtgttgccagctgtaatagaataccctggaattttatttacttttaattttgtttatttatttatgcttatgtgccatcttctcatgaaaaagaggcagtatgttaaaagtttgagttcagattttctgatgtagataaataagctaaagaaggcagggtgaagtgtgatatatgagaatttccagagcagggtattc

SEQ ID NO: 2411 - DNA, 373 bp, Homo sapiens
  misc_feature 148, 248, 285, 359: n = A,T,C or G
acaagctttttttttttttttttttttcgggggaagggtagatcaccatctggaatggtctattttaatttttttcttttcttttttcttttctttttttttaaatcaaggaacattgtcttggctttttttttttttttttttttgncattgcttttctcttttctttccttttttttttttaaagagaccattccactttattttaacatctggatgcataaggactcatgtaaagcagtcatacnccattatcattaaaacccatatggtaaaatacatacncagtccaacaaaaggctaatacatagtaaagcctaagcatactactatgtaatattataatacataacttgganactttagttaaagt

SEQ ID NO: 2412 - DNA, 185 bp, Homo sapiens
  misc_feature 171: n = A,T,C or G
acaaacacctgaaatgtaaacgtgaccctcatgttaagatagaagggaaggacactgatgactggctgtgcgcggattttggcagcatggtgattcatttgatgcttccagaaaccagagaaatctatgaattagagaaattatggaccctacgttcttatgatgaccagntagctcagatagca

SEQ ID NO: 2413 - DNA, 525 bp, Homo sapiens
  misc_feature 492: n = A,T,C or G
actcctaataaaatacttaataaatagcatataaaatcaaagtttaaaagtaaatgatggcagtttgccatactaaaaagataaagaatgtctaaaattataggaagataagatattagccctcatagaacttaaacttttagaaattctgaataaggaaatatattctacatagataaggtgtgaaacactcagctttctaaagtgaaataattaaatagtatcccacaatcaagagtaaggaaattctctaacatattccccaagaaacattaaaatatttcctatttcttataaaagtgaagataacagtgtatttccatcaacagaattcttatgaaacatcatttccacattaaatccacagccttctcagttaatatcttaaggaatatttcttggaaatataatagtcacctacaattcaagacactttgaaagattaacagccagtgattcctggctcacactatagtcaattgccaaaacttnaatagcatagcagataaaataacagcaaatagc

SEQ ID NO: 2414 - DNA, 367 bp, Homo sapiens
acaccactgtgcctgctttgaatcctttacgaagagaaaaaaaaattaaagaaagcctttagatttatccaatgtttactactgggattgcttaaagtgaggcccctccaacaccagggggttaattcctgtgattgtgaaaggggctacttccaaggcatcttcatgcaggcagccccttgggagggcacctgagagctggtagagtctgaaattagggatgtgagcctcgtggttactgagtaaggtaaaattgcatccaccattgtttgtgataccttagggaattgcttggacctggtgacaagggctcctgttcaatagtggtgttggggagagagagagcagtgattatagaccgagagag

SEQ ID NO: 2415 - DNA, 582 bp, Homo sapiens
  misc_feature 569: n = A,T,C or G
acaaaccacggatcttgtgtcagaaacacatgttgagactcctccattccttccagaattttcagagatgaggtagacccacctcaatcatcctcagcatcagtttgctaaattgccaggctcaatgacaagctctcctgccatctccaagcccacttttcatagttccgctctgtctttggctgcagcactttaggcactattctaagtcctggagtatatcactcttgcttcagagctaaataaacattaatgaacacacttactcagaacaagtcactggatagctgcccattgcaagttacatactcaggagatgaaagagggaagccattaaaggtcttcagagtagacaatacctagtcaagatgtggccagacaaagacacgaacttcttaccctaaaagagcccaataatttctgcatcagagaactcctatcttgggcaaagcaactgaattcaggagtgagagttgatattaaaacatggaggctgggcacagcagctcatgcccacaatcccagcactttggggggccaaggcagaaggattgcttgaggccaggagnttaagaccagctt

SEQ ID NO: 2416 - DNA, 397 bp, Homo sapiens
acaagataaaggttatgcatcacttttatggtattttgtgaactcagctaagggaatgcctgttcagagcttggagttgttacctttacttgaagtcatctcatccagtcccctgctttagggcaggacttcagttccactgttcatttctgaagcttctgtgtccccagcttaccctgttctggaatgttgtattccattggacagggctgctatttttagtcagccatgcatttggattttacgcttaatctagtaagtaaaaatgagaagaaaatttggcatttaaaaattgattttaagggttggcaaaagtattttttccagtaagcctttcactggatatctgtgaccaatgtttacctacgcaatgtttttgtatctgaattgcttatgt

SEQ ID NO: 2417 - DNA, 284 bp, Homo sapiens
  misc_feature 121, 259: n = A,T,C or G
acgatcttggctcagtgcaacctccgcctcctgggttcaagcgattcacgtgcctcagcctccggagtagctgggattgcaggcacccgccaccacgcctggctaatttttgtatttttantagagacggggtttcaccatgttggtcaggctggtctcgaactcctgacctcaggtgatccaccttggcctccgaaagtgctgggattacaggcgtgagccaccagccaggccaagctattcttttaaagtaagcttnctgacgacatgaaataattgggggt

SEQ ID NO: 2418 - DNA, 569 bp, Homo sapiens
  misc_feature 171, 172, 459, 498, 529, 551, 560: n = A,T,C or G
acatatattattttgatgtattaagatgaatattgctgatttaaattttatttatgcacatacttaaaggacagaaatgtctgggaaagtaattgttaaataatgatatgtaactttttaactttttaaataaataacaagatttttaatgtgtgtctccctcagggttgnntaaagttttttttctccctcaagtataaatagtggtaactatatgttttgtatcttctagcaccaactgctgtaaagcaatgctgcaaataatgcttgaatacaagtggctaagccaacaacagaataaatacttttatagtagttttataatcctgaaattcgaaagctttcccaattgcacttgcatctaaacaaaactgttgcagtttttactctatttattttgttccccatgtttatgaaagtcctgcacagtttcaaaggcatggtaaataatatatcaangtttatgtagtctgttacagaaacagctatagataacantatccagtgaagagcaaaattcaagctttanaaaatattcatgcatgcaattntgacatatntaaaaatag

SEQ ID NO: 2419 - DNA, 332 bp, Homo sapiens
  misc_feature 327, 328: n = A,T,C or G
ctttctgtgcattcatgcaagagtttcttgtaagccatcagaagttacttttaggatgggggagaggggcgagaaggggaaaaatgggaaatagtctgattttaatgaaatcaaatgtatgtatcatcagttggctacgttttggttctatgctaaactgtgaaaaatcagatgaattgataaaagagttccctgcaaccaattgaaaagtgttctgtgcgtctgttttgtgtctggtgcagaatatgacaatctaccaactgtccctttgtttgaagttggtttagctttggaaagttactgtaaatgccttgcttgtatgatcgnncctg

SEQ ID NO: 2420 - DNA, 304 bp, Homo sapiens
ggctttgggcagcttggcagtgaccaagaatgatgggcactaccgtggagatcccaactggtttatgaagaaagcgcaggagcataagagggaattcacagagagccagctgcaggagggaaagcatgtcattggccttcatatgggcagcaacagaggggcctcccaggccggcatgacaggctacggacgacctcggcagatcatcagttagagcggagagggctagccctgagcccggccctcccccagctccttggctgcagccatcccgcttagcctgcctcacccacacccgtgtggt

SEQ ID NO: 2421 - DNA, 426 bp, Homo sapiens
  misc_feature 54, 129, 147, 198, 208, 234, 236, 247, 289, 292, 313, 328,352, 386, 391, 398: n = A,T,C or G
gtctttttttttttttttttttttttttttttcttttttttttttaaagccaanaacttattttattttattttaaaataaacattgaaaatcccccatttcccaccaccctacaaaacttttgaatgnggaatgttcaacagcctntccattttggtaggttacaaaaccagcaaaaactccagttgtctaatgatnaatgtttganaatagttttgtttttaaatagctgancncctactggaanaattcctgggctaaatgctgaaaataaaatttaatttctgcncanaaaataccattaacttagtancctttgcttaaaggngggattaattctccatgaagtcanaatgagacaataagcagcattaacttcataggcncacanaactagngctcaaactgctagcacaaatttcaaca

SEQ ID NO: 2422 - DNA, 436 bp, Homo sapiens
acaatgaaaagatgctaaaacatcccagcaaatatttataaatgtttttagctcaactctccataaatcagtgtgctttttcatgtttctcataagatttacacctgaacaatttttaagagatgagctcactgtaattaaatagttaattcagtatggttacttaacagcttgctattcctgaggtataatgaccctaacatgctaagcacaggatcaaagatgctattactaaactaagaaaaaacaataaagtcatagattaggagaaaaaaatataaaatcaaaccaaaccaaaacaaacaaaaaactacaggcaagtggaaagtcatggtttgtaaaaagacaaccctaaaagagtataaaaagccacagacggatcctttgaagagttgtataaaatatttcatcaaattatttttgagacttttgaggt

SEQ ID NO: 2423 - DNA, 297 bp, Homo sapiens
  misc_feature 71, 170, 194, 195, 256: n = A,T,C or G
gccagggcaacagaatgagactttgtttaaaaaaaaaaaaaaagtgacttgatttaagggaaaaaatgacntggctatattcagtcagatatggcaaaaagtctcaaggtgttaatgtgaatgattaaggtcttggggggggtgtcccctatcagactacaggtgtttanaggcacagaaaaaggtgcagttgnnttcttaatgtgaaatgatgagaagcacaactccagtgtgtctctttgtgtagaatgtcagnagacaccccctgctagatgtgctggatcatgggaaagcatt

SEQ ID NO: 2424 - DNA, 552 bp, Homo sapiens
aaaaaccttatgatagtaaaagtttgcggactgcacttcagaaggagatcacaacgcgttatcaactggatccaaaatttatcacgagtattttgtatgagaataatgttatcactattgatctggttcaaaattcttctcaaaaaactcagaatgatgtggacatagctgatgtggcttattattttgaaaaagatgttaaaggtgaatccttgtttcattctaagaaaatggacctgacagtaaatggggaacaactggatctggatcctggtcaaactttaatttattatgttgatgaaaaagcacctgaattctcaatgcagggtctaaaagctggtgttattgctgttattgtggttgtggtgatagcagttgttgctggaattgttgtgctggttatttccagaaagaagagaatggcaaagtatgagaaggctgagataaaggagatgggtgagatgcatagggaactcaatgcataactatataatttgaagattatagaagaagggaaatagcaaatggacacaaattacaaatgtgtgtgcg

SEQ ID NO: 2425 - DNA, 251 bp, Homo sapiens
  misc_feature 210: n = A,T,C or G
acagtgatagctccccctgggcaatacaatacaagaacagtgggttttgtcaaattggaacaaggaaacagaaccacagaaataaatacattggttaacatcagattagttcaggttacttttttgtaaaagttaaagtagaggggacttctgtattatgctaactcaagtagactggaatctcctgtgttcttttttttttaaattggntttaattttttttaattggatctatcttcttccttaacatt

SEQ ID NO: 2426 - DNA, 105 bp, Homo sapiens
acttttttcttatgatgattggtgtagaaatgtgtgatttgggtgggcttttacatcttgcctaccattgcatgaaacattggggtttcttcaaaatgtgtgtgt

SEQ ID NO: 2427 - DNA, 496 bp, Homo sapiens
acttggaaattgtgctgctacttaaatattgaaggaattcagaaagttgtgtatttatcttaaaatgttccttctcacttattctactggaattgaccatgaaaaagaaaatattatgccttatttatatctaattattgactgtgcaaactgtgactcagtggatatttgtatgccccccaaaaacattttaaagctgagcaatttttaataaagatgtataaataattttgattattctcattgtagttaagttactgttagtttggtgcaatacattctttccttcctcatccttttaaaattaaatatataagatgtatgttttgttttattacattaagtgctatttttaaaaaattcattgtgtgtatatgagctaatacttgatttgtttctgtatagcatgattaaagataattgaaaattttgcacttattttaggcccttggaaatttgtattctaatactttttaagaatgtccatttattttgt

SEQ ID NO: 2428 - DNA, 168 bp, Homo sapiens
acggatgctacttgtccaatgatggtaaaagggtagcttactggttgtcctccgattcaggttagaatgaggaggtctgtggctaggagtcaataaagtgattggcttagtgggcgaaatattatgcttggttgtttggatatatggaggatggggattattgctagg

SEQ ID NO: 2429 - DNA, 448 bp, Homo sapiens
acaatttaatttttctgcttgcccaagaaacaaagcttctgtggaaccatggaagaagatgaaaatgagactggcaaagaacaaatgctgaatctgaagaagatttgggcaaataatctgcatacttttaattgggaataagatggaaaatatgaatgctaaatcaaattttttaaaaaatacaccacacgatacaactcaatacaggagtatttcttctcaaattcttctagcaccatcaacattcttcaagtatctgaaatactattaattagcacctttgtattatgaacaaaacaaaacaaggacctcagttcatctctgtctaggtcagcacctaacaatgtggatcacactcatgggaaagtgttttgaggtagtttaaacctttggagtttgggttttaaacttccctctgtggaagatattcaaaagccacaagtggtgc

SEQ ID NO: 2430 - DNA, 165 bp, Homo sapiens
taacattgaaaggtaaaatctgattatttagcatgagaaaaaaaaatccaactctgcttttggtcttgcttctataaatatatagtgtatacttggtgtagactttgcatatatacaaatttgtagtattttcttgttttgatatctaatctgtatctataatgt

SEQ ID NO: 2431 - DNA, 373 bp, Homo sapiens
acactccatgcttcttgaaaacttctgctgtgatggggacggtggaattaaccggattggcaatgacgcagatcatggcttccgggcagtgctgggcacaggcagcggtcagggtggccacaatcgtggcattggtgttgaacaggtcgtcccgggtcatgcctggctttctggggactccagccggaataactaccacatcacaacctttcaggcagtcaggcagctgttcaggtccgaggtagcctttcacagcggctttggtctcgatgtggctcagatctgcggccactccgggtgtgtgcgcgatatcatagagggtcaggcggctcaccaaggggctgttcttcaggagaagtgaaagtggctgccc

SEQ ID NO: 2432 - DNA, 525 bp, Homo sapiens
  misc_feature 446, 478: n = A,T,C or G
acatttacaaagatgcgttcaaatagtgctctaagagttttgttcagtggctcacttcggctaaaatgcagaaatgcatgctgtcagcgttggtatttcacattcaatggagctgaatgttcaggacctcttcccattgaagctataatttatttggaccaaggaagccctgaaatgaattcaacaattaatattcatcgcacttcttctgtggaaggactttgtgaaggaattggtgctggattagtggatgttgctatctgggttggtacttgttcagattacccaaaaggagatgcttctactggatggaattcagtttctcgcatcattattgaagaactaccaaaataaatgctttaattttcatttgctacctctttttttattatgccttggaatggttcacttaaatgacattttaaataagtttatgtatacatctnaatgaaaagcaaagctaaatatgtttacagancaaagtgtgatttcacactgtttttaaatctagcattattcattttg

SEQ ID NO: 2433 - DNA, 497 bp, Homo sapiens
acaaactataaaaatgttaacactgaagttttcaacagaagtctattaagatgccttagaaaaattaaacaacagcaagtcatttactgctatgaggttaatacataaagaaacattcacacattttactgaaattttcagtaaataactttagccataacacttataattaaaagttcaaaagttgtgtgtggctctacagcaattataatttgcaatgaaaacactaagccaaatctttttgggctgatcagaacaatcttagctacaaaattggctgaaatttgcaaaccttaaaaagaacaccaattgtgaatggaataggtatcataacttagcttaaagtggaagatggtaaaaactcgatgcttaagtctgaattgcacaaggaaaatattaggggaaaaaacactcagctattactgatagctattactttaaaaaaatattagatcattcttatattaaaaacatgaaatgaatccaagccagacagt

SEQ ID NO: 2434 - DNA, 264 bp, Homo sapiens
  misc_feature 200, 247, 249: n = A,T,C or G
caaagcagtggacaagaaggctgctggagctggcaaggtcaccaagtctgcccagaaagctcagaaggctaaatgaatattatccctaatacctgccaccccactcttaatcagtggtggaagaacggtctcagaactgtttgtttcaattggccatttaagtttagtagtaaaagactggttaatgataacaatgcatngtaaaaccttcagaaggaaaggagaatgttttgtggaccactttggntntcttttttgcgtgtg

SEQ ID NO: 2435 - DNA, 379 bp, Homo sapiens
ctgattgaattacggaaaatgcctgtaaagtctgagtaagaaacttcatgctggcctgtgtgatacaagagtcagcatcattaaaggaaacgtggcaggacttccatctgtgccatacttgttctgtattcgaaatgagctcaaattgattttttaatttctatgaaggatccatctttgtatatttacatgcttagaggggtgaaaattattttggaaattgagtctgaagcactctcgcacacacagtgattccctcctcccgtcactccacgcagctggcagagagcacagtgatcaccagcgtgagtggtggaggaggacacttggatttttttttttgtttttttttttgcttaacagttttagaatacattgt

SEQ ID NO: 2436 - DNA, 386 bp, Homo sapiens
  misc_feature 308, 312, 318, 320, 324, 379, 381: n = A,T,C or G
acagagtcttttgcttcctcccacccctagggggaaaaactgctttgtgctttgggaagttgtctctgaaacccggggacagaggacgcaggacagactaggagggagccgggaggatgggctgcagctgtggaggagggtttcagaggagagaggtcggagagcagaggcctgagaagccagaggcaggtggagagagggcggaaagtgagcagcggactgggctggagccgcacacgctctcctcccatgttaaatagcacctttagaaaaattcacaagtccccatccacaaaaaaaaaaaaaangaangaaaantntcanggaataaaaatagactttgaacaaaaaggaacatttgctggcctggaggggcatntnaattt

SEQ ID NO: 2437 - DNA, 61 bp, Homo sapiens
ctgaatcctgttaaattttctctaaactgtttcttagctgcactgtttatggaaataccag

SEQ ID NO: 2438 - DNA, 415 bp, Homo sapiens
  misc_feature 35, 150, 210, 307: n = A,T,C or G
acaagctttttttttttttttttttttttttttgntcttaagtaatttattttaaaattataagatttacagtaccttgattatgcaaaatagcataatggaaattaaaccaaatcaataaaccaaagagaaagaaaacttaattttctntagtatccatacttaaaccatctttgtaagtatctgatgtcccaaccatgtcttatgtanaaagtataatcgtttcaaatgtttcacttgcaggtttaatttctcattttcaatttttatgaactgtaatgcaatttcaaatcctattatacctagngtttatactgcaacagcagcaaatctcacatgtgtaatcaaatgtggaactggggcacagcttctagctgtagacagaaattatacgccgcattcagtccaggagagt

SEQ ID NO: 2439 - DNA, 531 bp, Homo sapiens
actctctgactccttacctaacaatgaatttgttacataatcttctacatgtatgatttgtgccactgatcttaaacctatgattcagtaacttcttaccatataaaaacgataattgctttatttggaaaagaatttaggaatactaaggacaattatttttatagacaaagtaaaaagacagatatttaagaggcataaccaaaaaagcaaaacttgtaaacagagtaaaaatctttaatatttctaaagacatactgtttatctgcttcatatgctttttttaatttcactattccatttctaaattaaagttatgctaaattgagtaagctgtttatcacttaacagctcattttgtctttttcaatatacaaattttaaaaatactacaatatttaactaaggcccaaccgatttccataatgtagcagttaccgtgttcacctcacactaaggcctagagtttgctctgatatgcatttggatgattaatgttatgctgttctttcatgtgaatgtcaagacatg

SEQ ID NO: 2440 - DNA, 503 bp, Homo sapiens
  misc_feature 307, 403: n = A,T,C or G
agaaaaaaaaacttctttaatgggaaattttacgattgaaatgatgtttcatcttatagaccacaaacaaatgtttttagacattgaaaagtggttaaagaccaactgcgcccagtcccccaagtgccattttctgagtgcagaatggagggtgacgtcttgagctgatgctgtgtccccagcatcaggttttctgttttccctcttctccccttattccttccttgtccattgccctcaaccttctttttctgtttgctctggcctggttcagtataacatatccatgaactctagtatgggcctncggacaatcatagctacaatcagactttctaagcaaatgggaatgtgatatacatataaccattagaaaccctatcatcacctcctagaggggaangtgaatttcttaatttttttagttgcaagagtcacttcttagccaactgactagagaatgcagaatgaacaggggaggaaggagctgatggcacagcctt

SEQ ID NO: 2441 - DNA, 151 bp, Homo sapiens
  misc_feature 147: n = A,T,C or G
acagccaggcccgtgtgctgttaatagtgtgaaattgtcatgttaaaaaaaaaacaggaaccaaatgtgaccttgtgcatatattggtagctgaaaatcttcaaggctactgatgggtggccccttaatcttgtctttgattgctgngtgc

SEQ ID NO: 2442 - DNA, 455 bp, Homo sapiens
actacggaatatctcgaaaaactgcactagagacaaagacgtgatgttaatatcttttccccacaattattacggataaacagtagcaccaataaataaatgataacaaatattaaaattaaaaaaggagagagatttagtatgtagaattctctattttttcttgttttgtttttacatataaaaaacagaatagcaatgtctattttatcagaatcacatatatacataaacatatatatatatatacacacaaatacaagttgccaaatatatatatagtatgtagatgtatattgaaaccttatttcaaaggaatgtgtgctggggagccaggggatcggggagggcagagctgagtgttagcaaaattaaatatctgttcaagataagctagtgactgtcaccgatcagggagagagagattggaaacatgaattttatatacaaaaacc

SEQ ID NO: 2443 - DNA, 444 bp, Homo sapiens
aaaaatttcaattctcgtggtaataccagagtagaaggagagggtgactttaccgaactgacagccattggggaggcagatgcgggtgtggaggtgtgggctgaaggtagtgactgtttgattttaaaaagtgtgactgtcagttgtatctgttgcttttctcaatgattcagggatacaaatgggcttctctcattcattaaaagaaaacgcgacatctttctaagattctctgtgggaaaatgactgtcaataaaatgcgggtttctgggtcattcgtcttactttcattttttgattacaaatttctcttgacgcacacaattatgtctgctaatcctcttcttcctagagagagaaactgtgctccttcagtgttgctgccataaaggggtttggggaatcgattgtaaaagtcccaggttctaaattaactaaatgtgt

SEQ ID NO: 2444 - DNA, 264 bp, Homo sapiens
actgtgtagagccattctatatgctgaatgttctgctgttgcaaacttgccagggtattagccagtgtttgtgccaagcagttttctgggacaacagaatgactcagaccaagatggataggatggttagggctttgcttcttgctgtttttctttgaagctagttcattgtcctgcaggtcccttcatcttccatacctagctcactcttttagcccttaccttaaatctctcagataagttggttcacaaagaatgttaagt

SEQ ID NO: 2445 - DNA, 413 bp, Homo sapiens
  misc_feature 386, 410: n = A,T,C or G
acagaaaagattggaatgccattcaggtcaaacatattgctgtctggggcagtggttttcaaactgtgttcggaagagttcaaggtgttgtaaggaagtccccttaggtgtcaccacggtggtaaaggaagatagttgtagcaggattcaggcccctactcttgcttcactacttcatccagagcagcttcacttttactctgggcttctgcacagttttcactcaaagggcttcatggtcacaaagccatagaggttctaccttgatgtatcaagagaagccttttctggaatctggtgcagccttgtgagatgctgttaggtaaggggactccttggtagaatttcttacatttgtgtaaaaagttctggttcctgagtaattncaaagaagatgctatgaggagttnact

SEQ ID NO: 2446 - DNA, 486 bp, Homo sapiens
  misc_feature 39, 42, 44, 68, 70, 74, 104, 111, 122, 132, 152, 156, 165,176, 184, 198, 200, 230, 250, 255, 269, 280, 310, 320, 347,413, 439, 483: n = A,T,C or G
acaagctttttttttttttttttttttttttttttttcnaananaattttaatctgaaaaattagcananattntgccttcacaattagagtttaacatgagtnttccagngttttaaaaanaactgtaatntacataaagcaaaatatttnggcntcacctagngaaaacagacnatgtggtnttttttcagccatntnatatagttaggccccgagttacaatttganataagttgattcctaaacanaatgngctttacagaatgngaccaattttnttactcccaaggaccttgtttcaaattatnttaaaaccanagttcactgatctcacattttaaaaanaaaaaagtttgttaactgttttaatcaatatgagtagtaacaaacatccctaattggattctaaanaggaagcagggaaggccaggtgcggnggctcatgcctgtaatcccagcactttgggaggccaaggcgggngga

SEQ ID NO: 2447 - DNA, 375 bp, Homo sapiens
accgcaagaaatgggacagcaacgtcattgagacttttgacatcgcccgcttgacagtcaacgctgacgtgggctattactcctggaggtgtcccaagcccctgaagaaccgtgatgtcatcaccctccgctcctggctccccatgggcgctgattacatcattatgaactactcagtcaaacatcccaaatacccacctcggaaagacttggtccgagctgtgtccatccagacgggctacctcatccagagcacagggcccaagagctgcgtcatcacctacctggcccaggtggaccccaaaggctccttacccaagtgggtggtgaataaatcttctcagttcctggctcccaaggccatgaagaagatgt

SEQ ID NO: 2448 - DNA, 400 bp, Homo sapiens
acccaaatgaccagatttggtaatgaccatgggtctactcatgggggtttgagtgatctaagaaaacaatggatcaaggatggatgatgaatttggatatgaaaaaccaggaatagactgaaaaccctaacacaatgaaggggagtctgaacagtgaaattataagggaaaagcttgtattaatagaagaaaatgcaaataagattatgaactctgattccaatgtggaggctgtcttcctcatgctgtatatttacattctcacctctgtctggataatttctgatttatactagagtcagagccagtcattggtggtaacagtgaggctttaagactatctcataatttagattaattctaattttctgagaatgctcttctgtctataagtggaagt

SEQ ID NO: 2449 - DNA, 442 bp, Homo sapiens
  misc_feature 41, 50, 103, 133, 152, 204, 252, 259, 286, 317, 324, 376,425, 441: n = A,T,C or G
acaagcttttttttttttttttttttttttttttttttagntttcaatgntttatcatatttgatagcagctttttttattggttacaaaacctaagcccatntacaaaattaggaacacatttagatgcctnttttgaaagaacgttttantctttttaaactgagtttaaaaaaaaataacaatgcaatttttaaacactgntttgaaaacttaaaagtgcagcaatatacttagtttcctttatctacnaaatggngcaattccaattcaaaactggtaaggncacaaattgaatcaaggaaatgcatacaagngtctgcnctacttgatgctaatgttcacttaaatgttagtttgcactttaaaacatganaggaaataggaatcatcacagtagaggcccaattttaatcataatgggngcaaattttaaaaggna

SEQ ID NO: 2450 - DNA, 475 bp, Homo sapiens
acatttaaaagaggcagaaacttggatctgcttcttttttcatcatgcttgtcagtttacggggtgagagaggagaagcttacagcagctgaggtgttcagataaactagttctggcctcgcagtttttgctgtgcaaaagatacacacattgttggggttaaaggcttggttttgggtgctactgctaaatatacagttttcagcactttactgacatatagtaaggctgccttagagctaggaaataaaactcagtttcctagatgttggaaaatcagagtatgaactctttcgttttgtttttgttaggggagggtgtgtctacaacctgtctagaggagactgtctagtctcctctgcactcaatcagaaggtctgaattgagggggattatggtattatcagtaaggcaaaagatgaaagaaacttttttttacctgctactcttaggctagggcaaatgtcacatatgt

SEQ ID NO: 2451 - DNA, 277 bp, Homo sapiens
actggatgtggttgcccccatttgtgtgtgtggttgtgtgtgtggttgtgtgttggtggccacagctgagcctctgtcaccagagaaggctgaggccccaatggcacacctcagaaacctacaccccgaggctgggcggctggactcctgagcacaagctccctctcgcaccctttgccagacagtttgtctccaatttcaaactgacctaaggctcttactcctggattttttgtttttaaaccttctcccagccagtcttcgggagggcatgatt

SEQ ID NO: 2452 - DNA, 319 bp, Homo sapiens
acttacaatgggaacattgagttcccatggaaggctctcaatgggaaaatgctccaccaagcttagccggactgggatctcctcactcccagacttctcagctccatgccttaaaatgatgtcgtcattacctgaggcctctgaattcggatctttgtttcagggtctatgtgtctcaaggagggctggaaattactatagatggactccaggtggatggaatcatcatcttggcagatgtcaaagccaatgttttggaaggtcccaggagctggtccactgtcctcttcttgccacttgtataactgagacaatctgt

SEQ ID NO: 2453 - DNA, 266 bp, Homo sapiens
actagccggacttggattttctggaaagatttcagttgaggaacgggaacaaagattatgatagctttccgaccaccaccaacttcgatttccttagctgccgtaatattcagctccctgagctgagccttgaggtccgagttcatctccagctccagaagagcctgggagatgccggactcgaactcgtccggcttctcgccattgggcttcacgatcttggcgctcgaactgaacatggctttctcctgggagaacttgccgag

SEQ ID NO: 2454 - DNA, 499 bp, Homo sapiens
acacataagtgtgtgtgtctcaggaagtaggaaataaaaatggaagctattatgacctcaaaaaaaaaagccaactttgagctaggataaaaattgggtaaaggacatttgcttacctgcaaatgaatcactgtggaaatgtgatcttcccatatcatcaagaaacttgttttctggatgaatactgggagaataaaatgagaactctggagtgagctaaattgatcccaattaagtttttctgcttagcagacagaaggtataattttttgacaccctttcccacctggtgcctatgctaggcttgtcctgagaacatccctcagtaacttgatattcacatgacctacaggatgtcccatctgcagggctgagtcagttggggaacaccagaggctacacagtagctcttcctgctactcggttaatgagcttggcaggttctttgtctcactgaattcttatcatggaaacagcagcagcagccgctaggaaatct

SEQ ID NO: 2455 - DNA, 193 bp, Homo sapiens
  misc_feature 71, 82, 100, 133, 154, 175: n = A,T,C or G
ttttttttttttttttttttttttttttttttggggttcttgtagttgaaatacaacgatggtttttcatntcattggtcgnggttgtagtccgtgcganaataatgatgtatgctttgtttctgttgagtgngggtttagtaatggggtttgnggggttttcttctaagccttntcctatttatgggggttt

SEQ ID NO: 2456 - DNA, 173 bp, Homo sapiens
acaagcttttttttttttttttttttttttttttttttacaaagctacttttaatactttggggtgagccccacaggaataaaaaacactgggaaggggtaaccccctcacccccgggagtggcccagggggagagaggctacctgaggggaaggaagcacaaaagggacccg

SEQ ID NO: 2457 - DNA, 231 bp, Homo sapiens
  misc_feature 195, 197, 219: n = A,T,C or G
ggtggtagaggagacaagttttatctccaggcccacagtctctccccaacaccccccaagaattccagagggagttctcagtgcccccggacaggcctctccagcttcacactcttggccgcttctccaatcagctcccagaaactcctgaactccagtttagagtcattgcagctgcccaggttggcaattttntnttccaggccacagttgctcggnatgagatggggc

SEQ ID NO: 2458 - DNA, 242 bp, Homo sapiens
  misc_feature 114: n = A,T,C or G
gcttcgtggaggttggccgggtggcctatgtctcctttggacctcatgccggaaaattggtcgcgattgtagatgttattgatcagaacagggctttggtcgatggaccttgcnctcaagtgaggagacaggccatgcctttcaagtgcatgcagctcactgatttcatcctcaagtttccgcacagtgcccaccagaagtatgtccgacaagcctggcagaaggcagacatcaatacaaaa

SEQ ID NO: 2459 - DNA, 270 bp, Homo sapiens
actgaacccgggcagatgaggggaggaacatctctgagcttgtttggaagtgctagcagggaagtccagatagatacttgtatgcctttgactgaagcgtggtcctcctctatcagagaaggtcgtcctctcgtcctcttcaactgagcatgcagctttaggagggacacatatggggcagtgagggaggacggggacacccgcctgctcagccagatcaaccaaatcaatcctggcgatcaatggggtgaaagatgttgcagtcagagt

SEQ ID NO: 2460 - DNA, 180 bp, Homo sapiens
acaatttaatttttctgcttgcccaagaaacaaagcttctgtggaaccatggaagaagatgaaaatgagactggcaaagaacaaatgctgaatctgaagaagaggacaactttgggcaaataatctgcatacttttaattgggaataagatggaaaatatgaatgctaaatcaaatttgt

SEQ ID NO: 2461 - DNA, 156 bp, Homo sapiens
  misc_feature 134: n = A,T,C or G
actcattttttatttagttctttggtaagaacaggttacaatttaaatccatctcttgtagtatagagtggcttagattgcctgttatgacgaatgaatatctatatcctagtgctgcttcctccccaggaaanacagcagaggccacacagagta

SEQ ID NO: 2462 - DNA, 379 bp, Homo sapiens
accagtgaacctgacagattagtttgggactggagttctaatgttgatatgaatcaactttattccttatatagctggcaccaggtggtcaaaaggctgactataaaatacagatgcaggaggattgttaaaatagacataagtgcactgtgcaaaatacatctgtttacttaaatctatgagaaaattaaatgaagggttcaaacagaaattaacaattagtgaaaacagatgtagtgctttaaaaaaaaacaaaaacaaaaaactacagatataacacatttttacccggaactttgaaaggtaaaaagcgattgctatacaacatcataaaacattccagtttgttctgtcttcctttataacaaaaacaaaaagt

SEQ ID NO: 2463 - DNA, 68 bp, Homo sapiens
caagcttttttttttttttttttttttttttgcgatagagtcgtgctctatcacccaagctggagtgc

SEQ ID NO: 2464 - DNA, 305 bp, Homo sapiens
acaacaccgggaatattgccagagttaacctgaccaccaacacgattgctgtgactcaaactctccctaatgctgcctataataaccgcttttcatatgctaatgttgcttggcaagatattgactttgctgtggatgagaatggactgtgggttatttattcaactgaagccagcactggtaacatggtgattagtaaactcaatgacaccacacttcaggtgctaaacacttggtataccaagcagtataaaccatctgcttctaacgccttcatggtatgtggggttctgtatgccacccgt

SEQ ID NO: 2465 - DNA, 225 bp, Homo sapiens
  misc_feature 183: n = A,T,C or G
acatagaaacaattttcttaactagtctatcgcctaataaaagtatgcatgagggggctgaatgaatgggcactgccaagtccctccgtctgcaggggaaacaagaggaccagtggctgcttcaacaaaacaggaatggatatttgtgtggtaggaacagcactgtggtccaatcaagaaatntgggcccacctttatgatgttagatgctggaatgaacaagcc

SEQ ID NO: 2466 - DNA, 221 bp, Homo sapiens
acttttctgtgacagctattactataggaattggcaccagctaagaaaatttacagtttaatactttagagcaaataattgcttagggtgctttaaatagcacaggaaatgtgtagagtgtttacttgacatttgctatattgaacactaatactgaaacagattctttgaccacagagaatgccagtgtaggaggggtgggggtaggtgggagaaagagg

SEQ ID NO: 2467 - DNA, 473 bp, Homo sapiens
acggtagaactgctattattcatcctatgtgggtaattgaggagtatgctaagattttgcgtagctgggtttggtttaatccacctcaactgcctgctatgatggataagattgagagagtgaggagaaggcttacgtttagtgagggagagatttggtatatgattgagatgggggctagtttttgtcatgtgagaagaagcaggccggatgtcagaggggtgccttgggtaacctctgggactcagaagtgaaagggggctattcctagttttattgctatagccattatgattattaatgatgagtattgattggtagtattggttatggttcaatgtccggagagtatattgttgaagaggatagctattagaaggattatggatgcggttgcttgcgtgaggaaatacttgatggcaacttctgtggaacgagggtttatttttttggttagaactggaataaaagct

SEQ ID NO: 2468 - DNA, 236 bp, Homo sapiens
  misc_feature 120, 121: n = A,T,C or G
acatcgcaaattctgcaggaaaccccttacataaaacttcaacaggcgtggacatcttcttttcactaatcttttcatatttttgtttctttgttgcagcctttagcccttgtcatggcnngctggttctattaaaatacatcaaaacatatcctaatgattccatgtcatctcggcgactctgctcaataccaagatgtgcattgatgctagcatatcgggcagtgccagtgagg

SEQ ID NO: 2469 - DNA, 556 bp, Homo sapiens
actgatgactcagtgaggtaatcctttagctggtatttaaaaacctaatacacaacaaggatattttcaagaatacagattttcaaaagcaattttgaactatgtctttaaaagatatcagaacttggtgaaggtcttacaaataatcatagaacacaatgttaagaaattaacttctcttgtggtatgttgaaattgtggagcattcatgattttcttttattgagaagttcttggtgtaaattcaaaactagtcatattttatcaacatttaagcttcttagtcatgccaagaaaaccaaaaaagatgaaaataaaagatctttagatctttttctcctgtcaagaaaataacccaaaatatagcaatcttaaaggtatgatgtatgatgaacgctttgaggctaggcacagagagagcaggcaatcttcattttgtttacttatttatttattttcaccaccaacattattagccatgcctttctgctaatcgattttagcaagtcgaggtaaaacacatgcaacattttctggcaaaagcttaatgtcaaac

SEQ ID NO: 2470 - DNA, 293 bp, Homo sapiens
  misc_feature 91, 112, 159, 161, 183, 191, 234, 272: n = A,T,C or G
tttttttttttggtgtttgtagcgccactttactgccaatagctgacattgccctgggttaggggagaataaataaaatctgtggcatcanacaggtattaccgaggcgaanagtggactgggctttcgtgggcacttaccctgggaagggggtatgangnggctggagaagtgttcatgganagtgtctntctcctgcccccaagggcacggaatcttctattccttctttgnacccaaagggcaaagtggaggccagggtctctttgctnaggagctaagtaggggaaaga

SEQ ID NO: 2471 - DNA, 459 bp, Homo sapiens
  misc_feature 441: n = A,T,C or G
acatatgtgctctaaaaacaaaccacccagaattgatactgttggtaaccaggagtataaggcagtggctctggggttcttaattcattcctaacttctttgatacttcacaggattaggaaagtggtcatcatacatcccacacagtctgtattacttcaggcttgtgggcaaggttaggaagaatcaatcagccttaactataaatacctgcactgtctctgaggacttactattttatgttctttttaatcaataccgatcagaagtttaggttataaaaacaattctacttcatgctttggtgcttggtaatttttggtgcgtctttaagcattactcttatatatcatatattaaaataccataaaaatgaaattcagacaaaatcactggcaccaaaaatggtttattctgagctgtcttcactttgactatttnggggggcttctctcaagt

SEQ ID NO: 2472 - DNA, 466 bp, Homo sapiens
acagaatgaagggcagagagtaaggactggaaaactggcaggaaacacactgacagccgtcatccctggaggaaactgctcaataaaacggctccatatttacttctctggtcacggttcatactccacgattttaacaaaggagttgaggaagctagatactgtaagtggaacggtgtgtctctggaggtaagcaggcttgctgatttcttgttttataattcttttttaattacaatgtaactactaagagcttcagttcccactggagtggtgcacacatctcattactactaaaaccacaggaatgttccagggaaacagactatcatcactgagcgaggtggaatccagccaaaaccccaggctaacatccagatgcctgcagatcagctaaaatccttttaaaggacttggaatctccagatactagttttaagtcttttctgggaactgggaagtttgt

SEQ ID NO: 2473 - DNA, 278 bp, Homo sapiens
  misc_feature 24, 93, 167: n = A,T,C or G
ggatttttatacttgatgaaaaanagcctaaacgctatctgatttgggataaagaaaaaggagcattaaccttgactatgcctttagctccanccacctttttaagagtcaattgctaggcaggtggggaagggctagtcacggaacgaaactgtaagccggaccangtgtgtggaggggaggcaataaaaagattacagggtggaggagcggaggctgaggaagaattgggacctagtttggcctggcaaggaggggagaggtcagatgggtctgta

SEQ ID NO: 2474 - DNA, 208 bp, Homo sapiens
  misc_feature 120, 123, 153, 171: n = A,T,C or G
attggtctcagacaccactttgccatccactatccggcgggtggtggtcttttggatggtttgcatggagttgctgctgtccaaggcatcaccaagattaaagtcctcgccatcttccancangcggcggtaggtggcgatctcagcctccancttgaccttgatgttcancagggcctcatactcctgggcctggcgctgtccctct

SEQ ID NO: 2475 - DNA, 538 bp, Homo sapiens
ggagagaccgagtgaacctaccttcatttcaggagggattggccgcttggcacatgacaactttgccagcttttcctcccttgggttccgatattgccgcactaggggatataggagaggaaaagtaaggtgcagttcccccaacctcagacttaccaggaagcagatacatatgagtgtggaagccggagggtgtttatgtaagagcaccttcctcacttccatacagctctacgtggcaaattaacttgagttttatttattttatcctctggtttaattacataatttttttttactttaagtttcaggatacatgtgccgaatgtgcaggtttgttacataggtatatatatgccatgatggaaatatttatttttttaagcgtaattttgccaaataataaaaacagaaggaaattgagattagagggaggtgtttaaagagaggttatagagtagaagatttgatgctggagaggttaaggtgcaataagaatttagggagaaatgttgttcattattggagggtaatgatg

SEQ ID NO: 2476 - DNA, 293 bp, Homo sapiens
cccacgtcccccttctctccaacccctcatatcagcaagggaaattaattaatgagatttgataaatcagtagatagaatgaggtccccattctgaaatatttagcagactggaaccaccacgcaagcctctgtagggggtggatggagacacttctaactttaataaactgcgactgaacgtggaaaaaaaaaaaaaaaaaaaaaaaaaaaaaaaaaaaaaaaaaaaaaaaaaaaaaaaaaaaaaaaaaaaaaaaaaaaaaaaaaaaaaaaaaaaaaaaaaaaaaaaaaaaa

SEQ ID NO: 2477 - DNA, 206 bp, Homo sapiens
gaggtattttctaaaaaaaaaaataaatgttttgggggtgttctgttttctccaacttggtctttcacagtggttcgtttaccaaataggattaaacacacacaaaatgctcaaggaagggacaagacaaaaccaaaactagttcaaatgatgaagaccaaagaccaagttatcatctcaccacactacaggttctcactagatga

SEQ ID NO: 2478 - DNA, 529 bp, Homo sapiens
gtttaaaatgtttttcttaaattagctttatacacaaacattttcatttactttatggcttacatactttagtagctaggactaaaattaagaaatacaaagctaaataaatcctccagtgatacttctattattgattgataccacattttcaagtttggaatatattaactgcaaaagctgtaagaaaagaagtgatgcaaatttgtatagaacatttaaaaaacaatattcatgatatgagggataaattaacaaatgaagtaactgatttcagaattaactaaaacatatgctataatttagaaatttaacattattaaagaaaacctaatagaaaaaaaattaattaataaagccaacccaccagtgtcaacctgtttttgcctgtgacaaaaacaaagatcatttgttttgatacaagttgtaaaaaagtgaatactagtcagtgaataaaaagcatgtctaagccattgaaaaacagcatgcattcctttctgttcgattgatttttaaaaaatacttatgt

SEQ ID NO: 2479 - DNA, 556 bp, Homo sapiens
  misc_feature 500: n = A,T,C or G
acttactgctaccagattgatttgtatcaaaacactatatgcccttatattgaactaactggtaatggctttaaaaatgagaaagtattgatccttataattatataaacgttctctacaaacaacaagcccaactttagtgagtttggttaggttcttgtaatcttttctatgctttcacattaagttattgtgcccagtcctttttctcatcttataaaattaaaatacttccaataaaagaaaaaaaatacaacacagtttaaaaagttaaaaaatagaaagtgaaagtcactttcacagaaagttgtagaaagtgaaaggcctactctttaaaatagcaaattaaggctacaaatttaaagttggaaataataaaaattataaaagttaaaaatctcatagcgacattaacttcttcttgaagagaaagcttggatttttaactatttgaggattttattgcatttaaatcaaaacacaatcattaggcttttctnaaacagaacacgtgcaatgagtaaaaattattttggagacacttaaaattttaact

SEQ ID NO: 2480 - DNA, 306 bp, Homo sapiens
gttcatggaacatagaacaaccatgaatgagtggcatgatccgtgcttaatgatcaagtgttacttatctaataatcctctagaaagaaccctgttagatcttggtttgtgataaaaatataaagacagaagacatgaggaaaaacaaaaggtttgaggaaatcaggcatatgactttatacttaacatcagatcttttctataatatcctactactttggttttcctagctccataccacacacctaaacctgtattatgaattacatattacaaagtcataaatgtgccatatggatatacagt

SEQ ID NO: 2481 - DNA, 480 bp, Homo sapiens
  misc_feature 35, 67, 104, 199, 232, 259, 303, 328, 334, 450, 458: n = A,T,C or G
caagctttttttttttttttttttttttttttttngacatgcaaatttgagtttatttttaaatagngcaatgaaatacacattgttcctaaaaaaggaaattntgacatttaaatgaaatttgaaaaccaaatagtaagaaatggaaagagatagttgtaagaatccatttaccaattttacagctaaaaattaaagngaagtagaaatagcaaaagataacagacaaatntattattttaggtcattaatttatagngccttatcatcttaagttataaatagaataaggattttgttatntaaaaactatcaaaaaagtatcagngaaaanacatgacctccatgaaatgtgctgagtggccagggtggaaatgttgtcaaaatgcagcggccctggctgggcaacaacagcctccatgacagtttgttaacttgtctttcgtaggnggccacanaaagttccataaacaagtgtac

SEQ ID NO: 2482 - DNA, 64 bp, Homo sapiens
  misc_feature 39: n = A,T,C or G
cgaggtaccaggacgccaacattccctttcctaggactnctggggccaggttctgcggagcagg

SEQ ID NO: 2483 - DNA, 430 bp, Homo sapiens
  misc_feature 209: n = A,T,C or G
actgtgggaaatacaagggtaaataagacatggtgcctgctctcaaggaaattatgatagactgggaaaagggaagagaaagaagtagaagtaaccagcatttgctaatcgcttgccacgtgccaggtgctttacccaatcgctgcatgtatagctcccaatgactctgtaagttagatattgtaatatctactttatataggaagaanaatgaaggcactgagactttaagtaaccacctccaaagctgggatttaaactcgtatcttggattcagaggcctgtgttcattccactacacatgctgttccctatgattcaaggcagaatgtgataaatccttggggagaagctacagcaaggtagaagaggaagagaagagattgctccttgcctgagggtaaaggtacctcggccggcgaccacgcct

SEQ ID NO: 2484 - DNA, 484 bp, Homo sapiens
  misc_feature 294, 307, 311, 418, 462: n = A,T,C or G
acaagcttttttttttttttttttttttttttttttggttttgaacctttaataaaagtaaaaaatgaatgcaaaaagaacacaatgttgaaaacttagtatgaatgtgaacctcactagatgttcaaatctggtagagtgcaaattttgttcatactattttacatttttacaaactcaaatcactttggttcatatattttctataaactattggcaaaaaaatcctcaaatttacattcttttggctacattatttctaacagatatagatttacttccggtttcggaganaaagacttattgngtgngcgtgatcaagtctgttttaaagattcactcgctgctttcatctaataacttctggtttttcataaaatgctgacatcttcattggaaatttttttcatgtaactgntttcattttcagaaaatatataagggggtcattccaaagttcanaatgatcctattttttaaaaaa

SEQ ID NO: 2485 - DNA, 531 bp, Homo sapiens
actcctaataaaatacttaataaatagcatataaaatcaaagtttaaaagtaaatgatggcagtttgccatactaaaaagataaagaatgtctaaaattataggaagataagatattagccctcatagaacttaaacttttagaaattctgaataaggaaatatattctacatagataaggtgtgaaacactcagctttctaaagtgaaataattaaatagtatcccacaatcaagagtaaggaaattctctaacatattccccaagaaacattaaaatatttcctatttcttataaaagtgaagataacagtgtatttccatcaacagaattcttatgaaacatcatttccacattaaatccacagccttctcagttaatatcttaaggaatatttcttggaaatataatagtcacctacaattcaagacactttgaaagattaacagccagtgattcctggctcacactatagtcaattgccaaaacttcaatagcatagcagataaaataacagcaaatagcagaggt

SEQ ID NO: 2486 - DNA, 173 bp, Homo sapiens
actaattttgcatttggccggatgctcttaaaaattaaaaagtagacatgtcacctagtaatatgcctattttaattttctaagaagttttgttaaaaattctattaaaatatacatatcctagttaccaatcacattcatacagagaaaatgaatattaaacatattactgt

SEQ ID NO: 2487 - DNA, 500 bp, Homo sapiens
acactggatgcagccatgcatggatggtttttctttatttttcagtgatttcctctgaagcagctgcactgatacatttgggagttggtggcttgactttgtccataaggggcgtggccacttcacatgatggcgggcctttaagagcacaaagaagtttaatatggacaacaacaggaaaaagcaagaagaaaacaagtagggaaaaacagctaacctggagagaaagaatttctttaacctttatgttcttcattaaaaatcttatcttggactgatttgagggatttttagaaacatggccttattttatataagcattaccttcccaggaatctttgttgtatattaatttttgataaccatttgattaactttaaaattaagtatatgtgtgtatatatacatatgtatgtttatatacacacatgtatctgtatagttttatatatacatatatacacatagacatacagagaaccactactttgtaatagtgt

SEQ ID NO: 2488 - DNA, 613 bp, Homo sapiens
acatttcccacatatgctcagggattatcttaattgtattcctttctgaagcttggaatcaagggaaaaaaagaacaataatgatttagggaaaaataatagttttttaaaggtagatttatagttagtaactttatataggtgaactgatcacagagaagggtgtaaatcatctgaataaacaatggattttcacacttactagaatctctaagaataatattttccatattacagctaaatgagacccattatgtatgctttcagataaactcacaaagctcttacccatgtaaatctcatagatctgccattattcgtaatgaataacaagttttatcatgcattttcattaaaaatgcattaatccctttgtagtaacctctccctaattcattgattcgataatacaagaacagtaaacatttctggcataacaaaaatgtggtatcaaagcatactgtatccataaatacaaaatgtaacaggaaaacaaatacatttatcaaaggaggatcaggttttccagccactaaataatgctatggtcgaatactgctacagtctaatacattaagaactcaatcatagtgccgcattgtgagccgtttgt

SEQ ID NO: 2489 - DNA, 581 bp, Homo sapiens
accggcgggcttcgaaaccgcagtcctccggcgaccccgaactccgctccggagcctcagccccctggaaagtgatcccggcatcggagagccaagatgccggcccacttgctgcaggacgatatctctagctcctataccaccaccaccaccattacagcgcctccctccagggtcctgcggaatggaggagataagttggagacgatgcccctctacttggaagacgacattcgccctgatataaaagatgatatatatgaccccacctacaaggataaggaaggcccaagccccaaggttgaatatgtctggagaaacatcatccttatgtctctgctacacttgggagccctgtatgggatcactttgattcctacctgcaagttctacacctggctttggggggtattctactattttgtcagtgccctgggcataacagcaggagctcatcgtctgtggagccaccgctcttacaaagctcggctgcccctacggctctttctgatcattgccgacacaatggcattccagaatgatgtctatgaatgggctcgtgaccaccgtgcccaccacaa

SEQ ID NO: 2490 - DNA, 472 bp, Homo sapiens
ttttaaacaagcatggaattaaaaccgtttctcagattatctccctccaaactctaaagaaggaatataaatcctatgaagccaagctccgccttctgagcagttttgatttcttccttactgatgccagaattaggcggctcttaccctcactcattgggagacatttctatcaaagaaagaaagttccagtatctgtaaaccttctgtccaagaatttatcaagagagatcaatgactgtataggtggaacggtcttaaacatttctaaaagtggttcttgcagtgctatacgtattggtcacgttggaatgcaaattgagcacatcattgaaaacattgttgctgtcaccaaaggactttcagaaaaattgccagagaagtgggagagcgtgaaactcctgtttgtgaaaactgagaaatcggctgcacttcccatcttttcctcgtttgtcagtaattgggatgaagc

SEQ ID NO: 2491 - DNA, 411 bp, Homo sapiens
acccagctggtgcctgtggggcctctcttggcaccttgaggtagttgctcgtttcctccaccgggccttatctttcccttctgggcgtttccagccctgtgttttcacactcagggctctggctgagattctgtcagttggtgctttcatctctgcacagtcatggaggccctaagaccttgtcttggatctgggaacttctctcagaatcctcaaacatcaccctggctgtgcatgggagctcacacctgtaatcctagggctttgggaggccgaggcaggaggatcatctgaggtcaggagtttgagaccagcctggccagcatggcggaaccccgtctctgctggaaatacagggattagccgggcatggtgacgcatgcctgtggtcccagctgctcggaaggctga

SEQ ID NO: 2492 - DNA, 375 bp, Homo sapiens
acggtcagggctattggttgaatgagtaggctgatggtttcgataataactagtatggggataaggggtgtaggtgtgccttgtggtaagaagtgggctagggcatttttaatcttagagcgaaagcctataatcactgcgcccgctcataaggggatggccatggctaggtttatagatagttgggtggttggtgtaaatgagtgaggcaggagtccgaggaggttagttgtggcaataaaaatgattaaggatactagtataagagatcaggttcgtcctttagtgttgtgtatggttatcatttgttttgaggttagtttgattagtcattgttgggtggtgattagtcggttgttgatgagatatttggag

SEQ ID NO: 2493 - DNA, 516 bp, Homo sapiens
accaggaacaaggtctatgcatctgcgttagatctgaaggccttggcagcacctcttcaattttaagagaatcaggccgggcacggtggctcacgcctgtaatcccagcactttgggaggccgaggcgggcggatcacgaggtcaggagatcgagaccatcctggctaatacggtgaaaccccatctctactaaaaatacaactaaattagccgggcatggtggtgggcgcctgtagtcccggctactcgggaggctgaggcaggagaatggcgggaacccgggaggcggagcctgcagtgagtggagatcgcgtcactgcactccagccttggaggaagagcgagactccgtctcaaaaaaacaaaataaaacaaacaaaaaaagatcagactgagtattcccctagacctactctagggaagcccatagctgaggcaaaatccccaaacagacttggcattagtggggctaggattctccattagtggagtgagggctttgatgtgagttgtct

SEQ ID NO: 2494 - DNA, 164 bp, Homo sapiens
  misc_feature 22, 45, 48: n = A,T,C or G
ccatttccttgtagactctgtnatttcctgcagctcctggttggntcntggagcagatgatctcaatgagagagtcctcgtcggttcccagccccttcatggaagcttttagctcagaagcgtcatactgagcaggtgtcttcaataggcccaaaatcaacgtc

SEQ ID NO: 2495 - DNA, 99 bp, Homo sapiens
acgatgtctagtgatgagtttgctaatacaatgccagtcaggccacctacggtgaaaagaaagatgaatcctagggctcagagcactgcagcagatcat

SEQ ID NO: 2496 - DNA, 362 bp, Homo sapiens
accgttgcccatgcggggattaatgtgcagagctatgtcccctgaggagcccaccttgaagttgatagcaaagctcttgcctgtgggaggcacatagcccttgatgatgatggttcttcgagctgtgagccctccttgcagcctcccgaaatatggcacaggcgggttgaaggttgggggtccttccatggtgggcaggctgttcagctgttgatggcaatgtccgggaccagggtaaggtggcatcatcgggggtccctggggccggaggggctggcctccgatgaagttgattgattgaagttgcagatccccatccacttgcaggtgggtgaccatctgtaggggaagccggtgcccgt

SEQ ID NO: 2497 - DNA, 443 bp, Homo sapiens
actattgacccagcgatgggggcttcgacatgggctttagggagtcataagtggagtccgtaaagaggtatctttactataaaagctattgtgtaagctagtcatattaagttgttggctcaggagtttgatagttcttgggcagtgagagtgagtagtagaatgtttagtgagcctagggtgttgtgagtgtaaattagtgcgatgagtaggggaagggagcctactagggtgtagaataggaagtatgtgcctgcgttcaggcgttctggctggttgcctcatcgggtgatgatagccaaggtggggataagtgtggtttcgaagaagatataaaatatgattagttctgtggctgtgaatgttataattaaggagatttgtagggagattagtatagagaggtagagtttttttcgtgatagtggttcactggataagtg

SEQ ID NO: 2498 - DNA, 320 bp, Homo sapiens
  misc_feature 202, 203, 204: n = A,T,C or G
actctccactcttccagtcagagtggcacatcttgaggtcacggcaggtgcgggcggggttcttgcggctgccctctgggctccggatgttctcgatctgctggctcaggctcttgagggtggtgtccacctcgaggtcacggtcacgaaccacattggcatcatcagcccggtagtagcggccaccatcgtgagccttctnnntgaggtggctggggcaggaagctgaagtcgaaaccagcgctgggaggaccagggggaccaggaggtccaggagggccggggggaccaacaggaccagcatcaccagtgcgaccgcg

SEQ ID NO: 2499 - DNA, 494 bp, Homo sapiens
actatcccagccccccaggttcgcctaatagtcttggctacttccctacagctgctaatcttagcggtgtccctccacagcctggcacggtggtcagaatgcagggcctggcctacaatactggagttaaggaaattcttaacttcttccaaggttaccagtatgcaaccgaggatggacttatacacacaaatgaccaggccaggactctacccaaagaatgggtttgtatttaagggccccagcagttagaacatcctcagaaaagaagtgtttgaaagatgtatggtgatcttgaaacctccagacacaagaaaacttctagcaaattcaggggaagtttgtctacactcaggctgcagtattttcagcaaacttgattggacaaacgggcctgtgccttatcttttggtggagtgaaaaaatttgagccagtgaagccaaatcgtaacttacagcaagcagcatgcagcatacctggctctttgctgatt

SEQ ID NO: 2500 - DNA, 500 bp, Homo sapiens
  misc_feature 498: n = A,T,C or G
tttgcggactgcacttcagaaggagatcacaacgcgttatcaactggatccaaaatttatcacgagtattttgtatgagaataatgttatcactattgatctggttcaaaattcttctcaaaaaactcagaatgatgtggacatagctgatgtggcttattattttgaaacagatgttaaaggtgaatccttgtttcattctaagaaaatggacctgacagtaaatggggaacaactggatctggatcctggtcaaactttaatttattatgttgatgaaaaagcacctgaattctcaatgcagggtctaaaagctggtgttattgctgttattgtggttgtggtgatagcagttgttgctggaattgttgtgctggttatttccagaaagaagagaatggcaaagtatgagaaggctgagataaaggagatgggtgagatgcatagggaactcaatgcataactatataatttgaagattatagaagaagggaaatngc

SEQ ID NO: 2501 - DNA, 308 bp, Homo sapiens
  misc_feature 299: n = A,T,C or G
tctagacaatgttttcctcttgaataaggaagcttagcttgtaattcttgacttacatcaagccatttgactgcctaacctagttcacttctcagctcctaaaagtgcccattccctaccttactttgcagattccgtttatccagccattttctttcttggctcttcctcctttctgtggagccaccagcaccactctgactagactcaggactccatttacagcctgtccagcgagtcatctggggataaccaaccttggtctagaatggtcactgttggtgactaggtattacctnttatgcggg

SEQ ID NO: 2502 - DNA, 591 bp, Homo sapiens
  misc_feature 577: n = A,T,C or G
actctgaataaataagcatggtcaaggagtgaactattttcttttggaaatttctttttaatttttattattaaagtattttatttttagggccttttgggttttattgaatagttcatttcacctgtttaagacttactaccaataagcataaaacctgacacgttaaaatccctgccctttggtgagcccactgttatttattaaaataaaagttattttatgggtgattaatacatgggttttctttttcctaaattaacaataatttaaataactgagtaattttaatattaaatttttgttaacaactgaatgtttccatacagttttcttagaaattgacctagctcttaaaggtgggcacttggcaaaactgccctatatagcacagtagcaagtaggtttatttctgatcattgtaactatgagccactgttaagtgaaaatgccagtgtattggggcttttcttttgctcattagcttaagaaaatttataactagacatttctaattgttttacatgtcatggggaagagtttgccaacatttaatgaaatttttatattccaggtnatgtatactaaagg

SEQ ID NO: 2503 - DNA, 515 bp, Homo sapiens
acttcagttggtgcacaaaatactgtcatttgctcaaagctggctgccaaatgtttggtgatgaaggcagaaatgaatggctcaaaacttgggagaagagcaaaacctgaaggggccctccagaacaatgatgggctttatgatcctgactgcgatgagagcgggctctttaaggccaagcagtgcaacggcacctccatgtgctggtgtgtgaacactgctggggtcagaagaacagacaaggacactgaaataacctgctctgagcgagtgagaacctactggatcatcattgaactaaaacacaaagcaagagaaaaaccttatgatagtaaaagtttgcggactgcacttcagaaggagatcacaacgcgttatcaactggatccaaaatttatcacgagtattttgtatgagaataatgttatcactattgatctggttcaaaattcttctcaaaaaactcagaatgatgtggacatagctgatgtggcttattattttgaaaagatgtt

SEQ ID NO: 2504 - DNA, 531 bp, Homo sapiens
acctctgctatttgctgttattttatctgctatgctattgaagttttggcaattgactatagtgtgagccaggaatcactggctgttaatctttcaaagtgtcttgaattgtaggtgactattatatttccaagaaatattccttaagatattaactgagaaggctgtggatttaatgtggaaatgatgtttcataagaattctgttgatggaaatacactgttatcttcacttttataagaaataggaaatattttaatgtttcttggggaatatgttagagaatttccttactcttgattgtgggatactatttaattatttcactttagaaagctgagtgtttcacaccttatctatgtagaatatatttccttattcagaatttctaaaagtttaagttctatgagggctaatatcttatcttcctataattttagacattctttatctttttagtatggcaaactgccatcatttacttttaaactttgattttatatgctatttattaagtattttattaggagt

SEQ ID NO: 2505 - DNA, 327 bp, Homo sapiens
acttcacctccagaaccttgttcttcaccgactgagggatgtcgggcacgaaccaggcggcgatgagcttgatgcacaaggccacgtgctcaaagaggatgacgaaggccaggcggatggccaggaggaaccagaactgctcggagaagttgtaatcggggggattgcggtagtccctgtatctgcacagagtcacgttttctgagccctcaatcccatcagggtcctggaagtccttggtgtggaagacggacaggctgtggttgacgtagcccttgaggcagtcgacagtagagttgccttctttcaggcatgggctatagcggt

SEQ ID NO: 2506 - DNA, 148 bp, Homo sapiens
acaagtcaggccagaggatactccttcagatctcagtgttagtaattccagtgtcatactggaaaacacgatggaagaccatgctgctgaggcatccgggaagcctctaggtgaaattagtgttccactggacagctctttactttgt

SEQ ID NO: 2507 - DNA, 414 bp, Homo sapiens
acttccttcttcaacatgcaattttctttctgaaactaataatgtaaaggaagatttgttacagaaaaagaatcgtggaggtaggaagcccaaaaggaagatgaagacacaaaaattagatgcagatctcctagtccctgcaagtgtcaaagtgttaaggagaagtaaccgaaaaaagatagatgatcctatagatgaggaagaagagtttgaagaactcaaaggctctgaaccccacatgagaactagaaatcaaggtcgaaggacagctttctataatgaggatgactctgaagaggagcaaaggcagctgttgttcgaagacacctctttaacttttggaacttctagtagaggacgagtccgaaagttgactgaaaaagcaaaagctaatttaattggttggtaacttgt

SEQ ID NO: 2508 - DNA, 191 bp, Homo sapiens
  misc_feature 107, 155, 158, 181, 182: n = A,T,C or G
actgaacccgggcagatgaggggaggaacatctctgagcttgtttggaagtgctggcagggaagtccagatagatacttgtatgcctttgactgaagcgtggtcctnctctatcagagaaggtcgacctctcgtcctcttcaactgagcatgcanctntaggagggacacatatggggcanngagggagga

SEQ ID NO: 2509 - DNA, 359 bp, Homo sapiens
acattgattagttagggtggggcaggaacaaatcacaatggtggaatgtcatcagttaaggctatgtttacttcttttgtggatcttcagttacttcaggccacgtggatgtatacgtgcaagtcacaggggatgcgatggcttggcttgggctcagaggcctgacattcctgccttcttatattaataagaaaaataaaacaaaatagtgttgaagtcttggggcggtgaaaatttgtgggggttggtgtggagagagaatgggcgatgtttctcagggctgcttcgagcgggattaggggtggcgtgggaacctagagtgggagagattaagctgaaggaagattttgtggtaaggg

SEQ ID NO: 2510 - DNA, 468 bp, Homo sapiens
  misc_feature 32, 293, 464: n = A,T,C or G
acaagcttttttttttttttttttttttttgntgcaaagcctttaattagaatgtttgtattttttacatcatgcataacttcacatttgtgattaattagtaattatttcaatacttgtaagctcatctgcctcagatttaatcataatacatgaattaaattaatcaaattaaggaacagcaatttagaaagaaacacactttaagaaatcaaaattctcaattcaggcagtctgtttctatcatttggtattctactcctttaaaaatttcatattgcccaacaaaaggnggttatttttactgtttttggagatgactgaacagatgaaggcatcagatgcctccatcagctggtattttgcctaagatctatttaagataaccttttcttatattttttacttaatattgggcataatcgtatcattcaagattaagtctgggttatttctttgataanaact

SEQ ID NO: 2511 - DNA, 346 bp, Homo sapiens
acttggataaatttataaataaattacatcatctcatttttatataccttcaaatatttatagacaacactgatatttcacattccataatgaaagagtcagcatcttttctgagcaaatatttaaagttatacactagagaggaagatcaaaggcctaaaggaaattcatcctttagggggaccaaggtctctcattatacatttaattgaagtttgttctttcctgactgtatgtctgcatttctgcaagtcagaatttgttctattcactgcaatcacaaactccacctacaaagaaggcatgtatcaaaatttaagcaaactttcacaaatacactatatat

SEQ ID NO: 2512 - DNA, 579 bp, Homo sapiens
  misc_feature 544: n = A,T,C or G
acaaacctgcatggtgtttatgcacacagagatttgagaaccattgttctgaatgctgcttccatttgacaaagtgccgtgataatttttgaaaagagaagcaaacaatggtgtctcttttatgttcagcttataatgaaatctgtttgttgacttattaggactttgaattatttctttattaaccctctgagtttttgtatgtattattattaaagaaaaatgcaatcaggattttaaacatgtaaatacaaattttgtataacttttgatgacttcagtgaaattttcaggtagtctgagtaatagattgttttgccacttagaatagcatttgccacttagtattttaaaaaataattgttggagtatttattgtcagttttgttcacttgttatctaatacaaaattataaagccttcagagggtttggaccacatctctttggaaaatagtttgcaacatatttaagagatacttgatgccaaaatgactttatacaacgattgtatttgtgacttttaaaaataattattttattgngtaattgatttataaataacaaaatttttttacaa

SEQ ID NO: 2513 - DNA, 375 bp, Homo sapiens
cttaattataacattcacagccacagaactaatcatattttatatcttcttcgaaaccacacttatccccaccttggctatcatcacccgatgaggcaaccagccagaacgcctgaacgcaggcacatacttcctattctacaccctagtaggctcccttcccctactcatcgcactgatttacactcacaacaccctaggctcactaaacattctactactcactctcactgcccaagaactatcaaactcctgagccaacaacttaatatgactagcttacacaatagcttttatagtaaagatacctctttacggactccacttatgactccctaaagcccatgtcgaagcccccatcgctgggtcaatagt

SEQ ID NO: 2514 - DNA, 482 bp, Homo sapiens
acctctgctatttgctgttattttatctgctatgctattgaagttttggcaattgactatagtgtgagccaggaatcactggctgttaatctttcaaagtgtcttgaattgtaggtgactattatatttccaagaaatattccttaagatattaactgagaaggctgtggatttaatgtggaaatgatgtttcataagaattctgttgatggaaatacactgttatcttcacttttataagaaataggaaatattttaatgtttcttggggaatgtgttagagaatttccttactcttgattgtgggatactatttaattatttcactttagaaagctgagtgtttcacaccttatctatgtagaatatatttccttattcagaatttctaaaagtttaagttctatgagggctaatatcttatcttcctataattttagacattctttatctttttagtatggcaaactgccatcatttac

SEQ ID NO: 2515 - DNA, 91 bp, Homo sapiens
  misc_feature 82, 83: n = A,T,C or G
ctcagaactgtttgtttcaattaaccagtcttttactactaaacttaaatggccaattgaaacaaacagttctgagaccgtnnttgcacca

SEQ ID NO: 2516 - DNA, 302 bp, Homo sapiens
  misc_feature 266, 267, 278, 288: n = A,T,C or G
actcttattgctgggggtgggtgagggctgcgagtgtgtgggcactgccacagccggactcccagccccgctgctagtcttgatggacagaggaattgagaggtccttctgggactctttgagcttctcagccaagacgttgatggtgttgggctgcagcactgacagttgcccatcagcagaaccgctcaatgcccctggcttccctgttcccttccccttatacctaagggcagagttggtgttctgcacgtcatcctcctcgnnatcctcatagncatcctcatnatctgagtacctcg

SEQ ID NO: 2517 - DNA, 538 bp, Homo sapiens
  misc_feature 52, 73, 141, 150, 156, 203, 301, 329, 403, 458, 512, 528: n = A,T,C or G
acaagctttttttttttttttttttttttttttttggataactcagtttcanataaaccatcttggttactgngcttaatttggaccaaattttatttagcttaatatggacactgacacattttgggggggatacattanacatatcanagcagngtatttctggatcattttttaaatgacctcttctaaaacataactgncacttacctgaaatgctgcatcctaaaattccaaaattatattgagcaatcgccaaggcctaaagccaactgacttaaaggtaatcatttcagctaanattaaatttaaagcctaagaatgtatanagctagttttaaaataatgatctcagatttttaaaaaggatataggaacctgcattgtcattctctgaattaanaactgatggtttctatcattatttagccccacctttgtattttaaaatccttcanaatacatttatgaaccaatgcgactggacttagccacacacaatggaaattcanaccttgactatttggngtttccagtt

SEQ ID NO: 2518 - DNA, 181 bp, Homo sapiens
  misc_feature 171: n = A,T,C or G
tcatttttgcagaaaagtaggcaggcagaaagaattatacataaaagtttccaaaaggaaaaacaaagaaatatttaatctgatctcttttcttttaaaaaattaattcagtagacttctattttttcctgtgtaacatgggaattcctggctctaaaatggatgaagggncagtgtcagt

SEQ ID NO: 2519 - DNA, 531 bp, Homo sapiens; identical to SEQ ID NO: 2485

SEQ ID NO: 2520 - DNA, 457 bp, Homo sapiens
actttaatatttatgttgttgttttcttgtttcttttttattcactgcagtatgaggaacaaatcacaaacacttactttggagaaacagagaccatagtgtagattttacaaaatcactttttaaaatctctgtattgtgctcctcaaatacctagagccagtctttgcataaaatatcacagctttatctataaccttaaaattctgcagcagcctaaagatatggataagatataccaccacttgctattctgaaatatatctattaccatatccaacctaatgatagtatctaaaaaattctttcttccataggaagtctctgacaagctgttattcatttccttgacgttaaaagaatctggggccaacatttgtattttatcagaaaaaaataaaaaaaaagtttacctaccatgttcatattaagaacaatgtctatacaagtcagttgt

SEQ ID NO: 2521 - DNA, 280 bp, Homo sapiens
ttttcttgttgtttaatattttgtgacaaatttggcaacttttaaaaagttgtttgaattgaatagtgcataaaattaatagatgtttttcagaaaatccattattaagagtagaggaatgaggagaaatattcgttctaaagagaatcaaaaccacaatgagagattgtcttacccccgttagaatgacagttaccaaaagacagtaacaaatgctgacgagaatgcagaggcaaaggaacgtttaaacactgttagtgggaatgtagacttgtacctg

SEQ ID NO: 2522 - DNA, 454 bp, Homo sapiens
tattcagacttcagtccattttctgaattgactgtgtcagtttttcaccctttaaaataatgccatttaatgataaaatacatttttcaaaaattcagaaatgtagtaacatttaataaatgtgaccatgaaaaatatttgtaaggaggtgccaaatgacttagcactgttttccactctgtatctaaaaaaaagttgcaatttgacagtaagcctatttaaaaaatattcttacattaattcatctcaaaaggttctattaatagtccttttgcaaaataccatatatataactgtgaacgttttttccagaattaatggaagaaaatgcatcctctgcacagatgaacattttctctctaaaactaatctttcatcacccagcatgtttttacaaaagcatgcaatataaaatacacataaaagcagctatcttaaacatgattttaataca

SEQ ID NO: 2523 - DNA, 472 bp, Homo sapiens
  misc_feature 463: n = A,T,C or G
acgatgtctagtgatgagtttgctaatacaatgccagtcaggccacctacggtgaaaagaaagatgaatcctagggctcagagcactgcagcagatcatttcatattgcttccgtggagtgtggcgagtcagctaaatactttgacgccggtggggatagcgatgattatggtagcggaggtgaaatatgctcgtgtgtctacgtctattcctactgtaaatatatggtgtgctcacacgataaaccctaggaagccaattgatatcatagctcagaccatacctatgtatccaaatggttctttttttccggagtagtaagttacaatatgggagattattccgaagcctggtaggataagaatataaacttcagggtgaccgaaaaatcagaataggtgttggtatagaatggggtctcctcctccggcggggtcgaagaaggtggtgttgaggttgcggnctgttagta

SEQ ID NO: 2524 - DNA, 384 bp, Homo sapiens
acaagtcattgttaagtttgcctttactttaaaaactaaaagaatacatttctatataaactagcagtcaggaatttgcctgttttctagcttcttcatctatctaaaatatatatttagctaccagaattatggtactcctaataaaatacttaataaatagcatataaaatcaaagtttaaaagtaaatgatggcagtttgccatactaaaaagataaagaatgtctaaaattataggaagataagatattagccctcatagaacttaaacttttagaaattctgaataaggaaatatattctacatagataaggtgtgaaacactcagctttctaaagtgaaataattaaatagtatcccacaatcaagagtaaggaaatt

SEQ ID NO: 2525 - DNA, 131 bp, Homo sapiens
  misc_feature 89: n = A,T,C or G
acaagcttttttttttttttttttttttttttttttggagacagagtttcactctcgttgcccaggctggagtgcaatggtgtgatctnggcccaccgaaacctccaccgcctgggttcaagcaattctcc

SEQ ID NO: 2526 - DNA, 319 bp, Homo sapiens
acaaatagttactgaaatgacgagacccttgtttgcacagcattaataagaaccttgataagaaccatattctgttgacagccagctcacagtttcttgcctgaagcttggtgcaccctccagtgagacacaagatctctcttttaccaaagttgagaacagagctggtggattaattaatagtcttcgatatctggccatgggtaacctcattgtaactatcatcagaatgggcagagatgatcttgaagtgtcacatacactaaagtccaaacactatgtcagatgggggtaaaatccattaaagaacaggaaaaaa

SEQ ID NO: 2527 - DNA, 305 bp, Homo sapiens
  misc_feature 10, 96, 121, 132, 195, 196, 222, 269, 289: n = A,T,C or G
acaagctttntttttttttttttttttttttgcgacgtagtctcatttttgcccaggctgcggggcagtggcgcgatcttggctcactgcagcctntgcctccagggttcaagtgattctnctgcctcagcntcctgagtagctgggattacaggcgcacaccaccacacccagccaatttttgtatttttagtnnagatggggtttcaccatgttggccanactgctcttgaactcttgacctcaggtgatccgcccacctaggcctnccaaagtgctgggatcacanacaggcgtgagccact

SEQ ID NO: 2528 - DNA, 374 bp, Homo sapiens
acaaacatgctcagaacttgctgggacagtgtgggtgggagaccagggctttgcaattcgtggcatcctttaggataagagggctgctattagattgtgggtaagtagatcttttgccttgcaaattgctgcctgggtgaatgctgcttgttctctcacccctaaccctagtagttcctccactaactttctcactaagtgagaatgagaactgctgtgatagggagagtgaaggagggatatgtggtagagcacttgatttcagttgaatgcctgctggtagcttttccattctgtggagctgccgttcctaataattccaggtttggtagcgtggaggagaactttgatggaaagagaaccttcccttctgt

SEQ ID NO: 2529 - DNA, 288 bp, Homo sapiens
  misc_feature 265, 280: n = A,T,C or G
acagaggggaaataatgaatagtattaaagaaacattctcgtcttcctttacctttaatcccctaatacctagtctactttttaaattttcagacttcactgctttttgaattcataattctaattttcacattattgttaatggaaaatcatatctaataaaggttttagttattcccatgcacagtatgaaaattctcatttgctgaggttttgtttcaagaaaatgtattggcatgtctttgagaacatgttttattgtctnctgtgtcatataatncaaactaa

SEQ ID NO: 2530 - DNA, 467 bp, Homo sapiens
attttgaaagattgcatgatttcttgacagaaatcgatcttgatgctgtggaagtagtttgaggaacatcctatgagttttcttagaatgtataaaggttgtagcccatccaacttcaaagaaaaaaatgaccacatactttgcaatcaggctgaaatgtggcatgcttttctaattccaactttataaactagcaaaaaagtgtttgcttattccaccagttctactgtgacatactcgagtataaagacatgtagcaataacggggagtgggggggggagtctcacagtgcctttggaagggcccgaacttgccttaaatcttcctcaaccaaataagtattttattagtgcttgagagaatctgaatgtaggatgggttcaactgcacaaaaggaaaagatttttaccactttttttatatagatataaagtgaagcaaccgccttagtgctgaaatatgtagt

SEQ ID NO: 2531 - DNA, 270 bp, Homo sapiens
actgaacccgggcagatgaggggaggaacatctctgagcttgtttggaagtgctagcagggaagtccagatagatacttgtatgcctttgactaaagcgtggtcctcctctatcagagaaggtcgtcctctcgtcctcttcaactgagcatgcagctttaggagggacacatatggggcagtgagggaggacggggacacccgcctgctcagccagatcaaccaaatcaatcctggcgatcaatggggtgaaagatgttgcagtcagagt

SEQ ID NO: 2532 - DNA, 377 bp, Homo sapiens
accaactagaatacctgtgcatcagacgaagtcaagaacaataggaataaaatgctttctgcatgtagccaaagcaaaacataatagaataaaagccagagactgtatatatttataaattagatcctaatctactacaagataacttttctatttttaactatataaaataacctctgtctcagcattgggactgtgttagcaactattattgtggaataacccagaacattggatttataccaacaaataggcaatattaatacagtgtattaataaatttattacaaattattaatacagtgtattaataaatttattacaaattattaatacaggtaaatgttttatttgtagacatggactgtgaaataaac

SEQ ID NO: 2533 - DNA, 119 bp, Homo sapiens
acgacctcggaccccgcctcagcggatgaggggtgctgagcggtcattggtgatggtgggacgaagcttgacagtggcaaaaggatttgtgcccctcgggaagagctcctgtggtgggt

SEQ ID NO: 2534 - DNA, 279 bp, Homo sapiens
accacctcattataccttttcacaagcaaatagtggccaaagatgtgaacggccagacacggtagccgacatatgtaatcccagatactctggaggctgaggcagaggatcacctgagctcaggagtttgagaccggcttgggcaatatagtaagaccccacagagaaatgtaaagccaggtgtgatggcacacacctgtagttccagctactggggaggctgaggcaggagggatggcttgaacccaggaactggaggatgcagtgagccgagatcgt

SEQ ID NO: 2535 - DNA, 356 bp, Homo sapiens
acctggatggtgtgtccaccatcgacacggaggggctggatttgtttctcaggcaatcctgtattttaattttagatgtatttcctgaagcatatttttcatagaatgtagcgtgtaaatagctttttaaataacttcttttttataagagtaaaagtatctttaggaatttctttctatagagttcttcattaacatttatacgagttttttgctgagtcagatggacagttgggttctgatgctttttccttctcctttccttttattattattatttttttcttttaagaactaaggtattgcctgaaaaacaagtgatgtctgtgcagccttacactctgtctttacagaag

SEQ ID NO: 2536 - DNA, 590 bp, Homo sapiens
  misc_feature 528, 537: n = A,T,C or G
acaatgcctatacttagtcttatttaaaataagaattgaatgcacaacagaaaatttatcattttctttatcattggaggggagggaaagaaagcaagcagaggtggggatatagttacactatttaagagctgaatacaaagacaatgagtctttcatagtctcaacaactccacaatgaataactgtggattatctcatttataattcacattggataaaaaaaatcggttcccctctgtgtgtatcaatttaattcaaaccttatcttcagaatacaaagatgaatactacaagataaactaactgcaataggtttttctaagtagaagaccaaacaccaaagggaatccctctttccaatgtcttctgataaggcaagattttgccagaatggaagtctaacacttaaataagcattctcttggccaagtaagaaactacagttgttgtgggtattaccctacaattaccatatgtattacatattaaattaaactcagcattaaatatgcttgtataattacnctgttaatngtgatagcagtgatgatgccggtggaaaaagcctgtctttagctcaagaaaag

SEQ ID NO: 2537 - DNA, 345 bp, Homo sapiens
acaagcttttttttttttttttttttttttattttaagtttcattttattattgcttgttagttgattaaagtaattcttcttccacttaatttttaaagacagtaattgctacactgaatgaaaccttaatgaagtttcactataagtatctattatcatttgattattttctacatagaagcatgcaaaaagtttaaaattcagtttcatttgacttagccttgactgtaatggaggactctatgaagaggggacacagtgcttatgggctggagtcccagcaactgcttggtggcggagtcccagtcgttccccagttcaagccgtgggcagatagatgggt

SEQ ID NO: 2538 - DNA, 413 bp, Homo sapiens
acaaagattggtagcttttatatttttttaaaaatgctatactaagagaaaaaacaaaagaccacaacaatattccaaattataggttgagagaatgtgactatgaagaaagtattctaaccaactaaaaaaaatattgaaaccacttttgattgaagcaaaatgaataatgctagatttaaaaacagtgtgaaatcacactttggtctgtaaacatatttagctttgcttttcattcagatgtatacataaacttatttaaaatgtcatttaagtgaaccattccaaggcataataaaaaaagaggtagcaaatgaaaattaaagcatttattttggtagttcttcaataatgatgcgagaaactgaattccatccagtagaagcatctccttttgggtaatctgaacaagt

SEQ ID NO: 2539 - DNA, 240 bp, Homo sapiens
  misc_feature 164, 172, 208: n = A,T,C or G
ctgctattctccgagcttcgcaatgtcgcctaaggacgacaagaagaagaaggacgctggaaagtcggccaagaaagacaaagacccagtgaacaaatccgggggcaaggccaaaaagaagaagtggtccaaaggcaaagttcgggacaagctcaataacttantcctgccntgacaaagctacctatgataaactctgtaaggaagntcccaactataaacttataaccccagctgtgg

SEQ ID NO: 2540 - DNA, 332 bp, Homo sapiens
acatggccaccaagtaagaatggttggtgacaagacagaaggctaaaacaggaaggtaatcttgtgcacctgacaaatagaaagaataaaggatcaaaattgaaggcaggctataagagtatcaagaaattcttaaaaaccaaaaagtgatttggaagcacaaaacttacagttaatgctacccaatgtcatgatgggccaagaacattgtggcttcctaagttagaaaatgccatatgccaaaattttaaatggaacacactacatttttttctaatcaatccccccctctcccagaaaaaataggaactcatttttttcagggtggggag

SEQ ID NO: 2541 - DNA, 529 bp, Homo sapiens
  misc_feature 299, 515: n = A,T,C or G
ctttttttttttttttttttttttttttggttttgaacctttaataaaagtaaaaaatgaatgcaaaaagaacacaatgttgaaaacttagtatgaatgtgaacctcactagatgttcaaatctggtagagtgcaaattttgttcatactattttacatttttacaaactcaaatcactttggttcatatattttctataaactattggcaaaaaaatcctcaaatttacattcttttggctacattatttctaacagatatagatttacttccggtttcggagagaaagacttattgngtgtgcgtgatcaagtctgttttaaagattcactcgctgctttcatctaataacttctggtttttcataaaatgctgacatcttcattggaaatttttttcatgtaactgttttcattttcagaaaatatataagggggtcattccaaagttcaaaatgatcctatttttttaaaaaacaaaattcctgtaaaacaaattaactccaggaactttnaaatttactccaag

SEQ ID NO: 2542 - DNA, 262 bp, Homo sapiens
accaaatctttgggattcattggcaaataatttcagtgtggtgtattattaaatagaaaaaaaaaattttgtttcctaggttgaaggtctaattgatacgtttgacttatgatgaccatttatgcactttcaaatgaatttgctttcaaaataaatgaagagcagctgtccttctttcctcttttaagtgttcagctgtggcatgctcagaggttcctgctggattccagctggagcggtgtgatacccttctttttcagct

SEQ ID NO: 2543 - DNA, 468 bp, Homo sapiens
acagaccagtggttctcaaactttaaaatgcctcagcatcacttgggagcttattgaaatgcagatcccagagtcagtaaatctgcctgtgaagtatgatagtctgcatttgtaatgagcattcaagtgattctgatgcaggtgagctgggggcatacagggaggaacactgccctggactatccattgcatttttgcctctaaacaactacagaattttctagggttttaaattatgtaaaatgtttacttattctgagcttagagagaatggggagggtatttttaaattttattgttttatttctttaagtttttctttgctttaagattataggtattaggtttgtttttgtttttccacttatcttgagttcactttgatgttaaatctattgctacttcagttgtaaaaccagccaaaagtttctggatgaaggtcaagtttgaccttttaggagttattgt

SEQ ID NO: 2544 - DNA, 606 bp, Homo sapiens
  misc_feature 603: n = A,T,C or G
actggagatgtatttgataaccaaggttttaggtaaattttcaccagtattagttctatttgcaaactgaaaaatgttgtaggcttaatgtaaaataaccacattagtgaacattatatctcttagaagaaaggccatattttgctcctgcttctgtaaaaatattatttgtttgaaggggaaataatggtagtgtgacctttcacttaattcctactcccttaatgtgagagaggcaaaatgagctgaagaaggaaaattctggagttacactccacaaccttgaacatactgacggacatctctgttttgacaacgatttctccatgccacccatgctctaatgccttgtggatcacggacaaccctctttgcacaagctacagcatcagcgatgttatcttgcagcaaagcactgcaggataaatgacaggcattaactgctcctggggttttgccatcattacaccagtagcggctattgatctgaaatatcccataatcagtgcttctgtctccagcattgtagtttgtagctcgtgtgttgtaaccactctccatttggccaaacacatccagtttgctaggctgattcccctgtancca

SEQ ID NO: 2545 - DNA, 552 bp, Homo sapiens; identical to SEQ ID NO: 1583

SEQ ID NO: 2546 - DNA, 271 bp, Homo sapiens
actctgactgcaacatctatcaccccattgatcgccaggattgatttggttgatctggctgagcaggcgggtgtccccgtcctccctcactgccccatatgtgtccctcctaaagctgcatgctcagttgaagaggacgagaggacgaccttctctgatagaggaggaccacgcttcagtcaaaggcatacaagtatctatctggacttccctgctagcacttccaaacaagctcagagatgttcctcccctcatctgcccgggttcagta

SEQ ID NO: 2547 - DNA, 358 bp, Homo sapiens
ctttaaaaactaaaagaatacatttctatataaactagcagtcaggaatttgcctgttttctagcttcttcatctatctaaaatatatatttagctaccagaattatggtactcctaataaaatacttaataaatagcatataaaatcaaagtttaaaagtaaatgatggcagtttgccatactaaaaagataaagaatgtctaaaattataggaagataagatattagccctcatagaacttaaacttttagaaattctgaataaggaaatatattctacatagataaggtgtgaaacactcagctttctaaagtgaaataattaaatagtatcccacaatcaagagtaaggaaatt

SEQ ID NO: 2548 - DNA, 261 bp, Homo sapiens
acaagacttgcattttcagggttggctgggcaggtttggggctggagggcctggagttggggtccccaggctgagggtcatggttgtgtgtcttctcctgaggaaagtgtgaggtgctccctaacctatgacttccccgcctaagaaacagagtcaggatggctggagaatcgcgcctcagaaattaagcctatgtcccagccctgagattcccctcaggtatctccggcctgcagtctgatggtgacttttgggtttctt

SEQ ID NO: 2549 - DNA, 145 bp, Homo sapiens
  misc_feature 92, 139, 142: n = A,T,C or G
gttttactaaaaaacgcaacaatcagatacggaagacctcttatgctcagcaccaacaggtccgccaaatccggaagaagatgatggaaatnatgacccgagaggtgcagacaaatgacttgaaagaagtggtcaatanatngat

SEQ ID NO: 2550 - DNA, 567 bp, Homo sapiens
  misc_feature 553: n = A,T,C or G
actgtctcttttggaaaagttcttgatccccaatacttcacaagcagagagcaaagtcttctatttgaaaatgaaaggagattactaccgttacttggctgaggttgccgctggtgatgacaagaaagggattgtcgatcagtcacaacaagcataccaagaagcttttgaaatcagcaaaaaggaaatgcaaccaacacatcctatcagactgggtctggcccttaacttctctgtgttctattatgagattctgaactccccagagaaagcctgctctcttgcaaagacagcttttgatgaagccattgctgaacttgatacattaagtgaagagtcatacaaagacagcacgctaataatgcaattactgagagacaacttgacattgtggacatcggatacccaaggagacgaagctgaagcaggagaaggaggggaaaattaaccggccttccaacttttgtctgcctcattctaaaatttacacagtagaccatttgtcatccatgctgtcccacaaatagttttttgtttacgatttatgacaggnttatgttacttcta

SEQ ID NO: 2551 - DNA, 425 bp, Homo sapiens
actccaaagttcatcaatatttaagaaattatccgaatagcttccaacttggtttacagctaaataacagatactgcttttaggtttttttatacaatgcatctaaactttaggttcgaaatttaagtgctgccttacactgtgaatggcagtttgatcactaaatttatgttccagtttgagatacttcatacacaacatatatttaatgccctgaaaacttctgcttaaaaactgagttatttagtgaacatctgaaggtaacaaaaaaagatagatcttctatatttttatgtagaattgggtataaagtcatttggggtcaaacacaattattttttaaatgttatcagtccgcccagtaataagaacttttgtaaatatgccactatagcttcgggcaataattgctattatgaagttag

SEQ ID NO: 2552 - DNA, 354 bp, Homo sapiens
acaagcttttttttttttttttttttttttttccacttacattttttattctctttttctaattaaatgcacatactaagaagtaattaaatcttcaaataattgttgttacatatcttaaatctgctaaacattgagaaaaatatagtatatataattacataaaaattttatttaatttaaaaatcacgtttaaattatatcttagctatttacatacatgtttagtaactagtttacaattgtagctgatacttaacaaggataaatagggctattcaaattttgttaaatatgccttaaaattgaatccaagtcacattactataataaaattagcattatcattgatgt

SEQ ID NO: 2553 - DNA, 477 bp, Homo sapiens
accatggtaacaagaatggctgcagcaatctcagacaacagcgccaaggtttgcaagtgggtaggaatgaaagctgctccacagtaattggcctgagaccgctaatgcttcctaagaggtatttcctaatatgcttggtaagcagatcacgtgtaacacagatgtaaatggagtatgataacgcttctgcaaagtaaattctgtaagttcctgggcaggttttacagatctctttcatccatgataaatggttgctaaattatgattctgcaaaagtaatcccataaatagacatctaggtaaattttacaaccagtgaaattcttaggccaaaaaataaatagccacacaaatcaaacctacacactgtgaattaaaatgaagccagtgttagggtttctcaaagaaccagaacaggaaagattattcaaatagaagatcctcgtccttctcttcagccagaagattagcaggctc

SEQ ID NO: 2554 - DNA, 306 bp, Homo sapiens
  misc_feature 248, 253, 270: n = A,T,C or G
ctttacatgtaatcctctcaacaatcctatgaagtaggaactattattatcacctctgtttcatatacgaggaacttaggtataaagtgagtaaatatcttgcccaagatcacatagttaagtggcagagccaggatttaaattcaggaagtatttgctcttaaccactaaactatgctgcatataggatgctccaaggaaaaatgtaatctatggaactgtggaactactacaggagattgactgtngtatnttttatcaagggatgtnagattacaaagccctctgttgcttatgcactttcta

SEQ ID NO: 2555 - DNA, 515 bp, Homo sapiens
acattttcatgagcagtaattaagatatgttgaaattttaaatgtgaaagatttcaaagtttcagtatgttaacattactcttcaaatgttcttaatatatatataaacacttacaaattatagatacaactagttgtatatctacaatacatatatgaacaccattcttcttctctagccatatttatatgaggataaagtaataaatctctgtgctattcaaggaaaaaaaatgaatgctttaaaaaataaatctttaaagaatagtttcaaaaataaagttcaaatattgcacaaaataatttaactgtaaatattactacatagtgtaaaacaattttaaaaaaatttttacactctacagtaaatcccactttctaattctataaaagaatttattggaagtccacattaaatgtttagatattaaatgcttacattcagtttgatgggaattcaattttcacaagttaactgagactttgtcttaaaagttcatctatttgagttttgt

SEQ ID NO: 2556 - DNA, 283 bp, Homo sapiens
acaaactttataaagaatgttagtatgtcataaaatataacattacagcttatttaaaaccaaatatagttgaacatatttaaaatacattttcacagaatggatgaattagttgtttcttcagagttacttatgaacagttgaatgctttaaaatgttctgtctgtaggtaacatctaaaacacaagtgggtttatttaaatttttaaaatttgaaattttttatttgcaaaaaattgttttatgctttattatatcacaaatgagtgtcagatttttgagt

SEQ ID NO: 2557 - DNA, 547 bp, Homo sapiens
acatctgacaatactgcctcttttatgttgtatttagaaattaatatacttataaaattaagatttattagccaaacttgaattctagttttaaaactgactgtgaattttatttttcatatatttatgcattacacaccttagctataagaaaaaaagggttttgattatatgcttcttgcagttaatctcgttatttaaacaaaaagttttgggtctgtctttggagtatttgtaacttctaaattttgaaatgactgaattaggaatttggatgcttattcttttagtctgtttgcctaaaaaccaatttacaatctgactgtctcttgggagagggaggtgccttgcaaactttcacattaagaatgtgcctgaggctgctttactctggaatagtctcagatctaaaatttcctctatataaggtggcatatgttaagttttgcttcattggaccgtttagaatgctatgtaaaatgttgccattctgttagattgctaactatatacccatctctgatttggctctccttaagtgatagga

SEQ ID NO: 2558 - DNA, 246 bp, Homo sapiens
cttggtgccaccattgagaactccaggattgtcctgcagatcgacaatgcccgtctggctgcagatgacttccgaaccaagtttgagacggaacaggctctgcgcatgagcgtggaggccgacatcaacggcctgcgcagggtgctggatgagctgaccctggccaggaccgacctggagatgcagatcgaaggcctgaaggaagagctggcctacctgaagaagaaccatgaggaggaaatcagt

SEQ ID NO: 2559 - DNA, 377 bp, Homo sapiens
accaactagaatacctgtgcatcagacgaagtcaagaacaataggaataaaatgctttctgcatgtagccaaagcaaaacataatagaataaaagccagagactgtatatatttataaattagatcctaatctactgcaagataacttttctatttttaactatataaaataacctctgtctcagcattgggactgtgttagcaactattattgtggaataacccagaacattggatttataccaacaaataggcaatattaatacagtgtattaataaatttattacaaattattaatacagtgtattaataaatttattacaaattattaatacaggtaaatgttttatttgtagacatggactgtgaaataaac

SEQ ID NO: 2560 - DNA, 326 bp, Homo sapiens
acattcatagttgcactatttgtaatagcgccaaaatggaaagttctcaagtgcccatcaacaataggatgaacaaattgtaataagtcccacaatagaacattattctgcaatgagaatgaaaagatccacaatcagcacaatacagaggaatctcacaaatgtaaggctgagagaaagaagccaggcacaaaagaatacatactgattgattctatctacataaaagacaaaaccaggcaaagctagtgaatgatattagaagtcaggatagttgttgttctgggagtaataaagtgacaaggaggtgcttttagagcgctggt

SEQ ID NO: 2561 - DNA, 394 bp, Homo sapiens
  misc_feature 49, 225, 329: n = A,T,C or G
acaagctttttttttttttttttttttttttttttttagtatttcttgntatatttcataaacagtctaacaaaacactaacaaagttattttgcttattattctgatgctggaataatttggtcaaatattcataaatagttatcaactttaccaaggcacaaaaatcaagaatacatgctttctataaactcatttactactttaaagtttttaactgtttancagttataggaaatttttttaatcgaaaagaaaactatttacatttcaaatacaaaagaaaattaaaattattcttgattgatctctaaaacccaaccacttanatgctcattattattattttctttcaccaatccagtatactctattcaacatgtgcatcctgtgt

SEQ ID NO: 2562 - DNA, 211 bp, Homo sapiens
gccgcagacgccgccgcgatgcgctacgtcgcctcctacctgctggctgccctagggggcaactcctcccccagcgccaaggacatcaagaagatcttggacagcgtgggtatcgaggcggacgacgaccggctcaacaaggttatcagtgagctgaatggaaaaaacattgaagacgtcattgcccagggtattggcaagcttgccagtg

SEQ ID NO: 2563 - DNA, 332 bp, Homo sapiens
acagttagtgggagcacactatataaatcctttgcatgacaccattcaacaatattttttaaaatctacaaaattttaaagtttcacttccctagcaaaatatcttcagtcaagaaattagtctttgaaaattatgaaaattgttgtgggaaatatttatacaaattattactgataatgcacatatattttgaaacattgtttctagaagcaataaaatataacctatttaggagataacccaaatgatttgtaaaaaaattaacttgtagaaaagggaaggatgttgtgtaaaatcaagtcaattatttgaggtttttataatattgagt

SEQ ID NO: 2564 - DNA, 501 bp, Homo sapiens
acagattgtctcagttatacaagtggcaagaagaggacagtggaccagctcctgggaccttccaaaacattggctttgacatctgccaaggtattggccttcctctctgaactcagaatggctcaaaatgtggaaacaggctgggtgcggtgggctcacatctgtaatcccagcactttgaaaggccaaggcaggagtattacttgaggccaggagctcaagatcagcctgggcaacaacacagcaaaactctatctcttaaaaaaaaaataaaaaataaaaataaaaaagggaggctgaggcaggtggaccacttgaggtcaggagtttgagaccagcctggaccacatagtgaaaccctgtctctactgaaaatacaaaaaaattagctgggcatggtggcaggtgcctgtaatcccagctactcgggaggctgaggcaggagaatcacttgaacccgggaggcagaggttgcagttagccgagattgtgccattgcac

SEQ ID NO: 2565 - DNA, 434 bp, Homo sapiens
acttaaattagaaattttaagaagcataaaatgttggcttgaaaaggtgccttagagaccatctgctcaaactaaggccttctgcagatgaggaggccgaggctttgggtggcacaggcgggacttgcccaaggccacacatcccgtgagatgcggggccagcaccggaatcagggatacttggctgctgagtgaagggatttttctgctgagaagttggcttagtctgattattcagatgcctcctctggctctggaatcagtggagttccaacccagtctctaccactttctagctttgtgatccaggaacagttcaaacccggcacacagttttatcattttttataaaatggggataacgctggctcctctcccattggattgagaccaggaatcatttaagtcagtgttttgcacagcacctgacaggt

SEQ ID NO: 2566 - DNA, 270 bp, Homo sapiens
  misc_feature 253, 264: n = A,T,C or G
actcgggctctgactacagaagtggccttgcactccctgccattgatggtctggattccaccacttgtgtccatggagcatccttctccgatagtgaagatgaatcctgtgtgccactgctgcggaaagagtccatccagctaagggacctggactctgcgctcttggctgaggtcaaggatgtgctgattccccatgagcgggtggtcacccacagtgaccgagtcattggcaaaggccactttggagttgnctaccacgganaataca

SEQ ID NO: 2567 - DNA, 342 bp, Homo sapiens
  misc_feature 191, 269, 288, 296, 301, 322: n = A,T,C or G
gaaggatgctgcaagctgaccccaataaagtttctgcaagggcgaagaaaagaggccttcctcagttggggaccctgggagcaggcaaccattatgcagaaatccaggttgtggatgagattttcaatgagtatgctgctaaaaaaatgggcatcgaccataagggacaggtgtgtgtgatgatccacagnggaagcagaggcttgggccaccaagtagccacagatgcgctggtagctatggagaaggccatgaagagagacaagatnatagtcaatgatcggcagntggcttgngctcnaatcgcttccccagagggtcnagactatctgaagggaatgg

SEQ ID NO: 2568 - DNA, 550 bp, Homo sapiens
  misc_feature 542: n = A,T,C or G
acatgatacagattggttttgcagtttttaatgaactgaaatagaaatgtctaaatacagcagtatctgcctgtgcaacaaatatctgtaaggtaaaataaggtatttgatagaagaacatctgcaagaacaaatcagatgaaaaatctgaaaaggtttctatataccttctggattttaaaaaaacccaaaaattaatggctcaagatactacattgctaaagttaggggaaaaaagtaaaaaggctgtgagttctgttgcaagagctcatttgtagacttgcaaaatctaactaattttatattatgcttgttgttagagcagtgctcaaaattacagaggcttcaaattgttatgttttcacaaaatttgctacatatgttgtcatgaatgtgtgtcagggaattcatacccaggtaaatgacaattacatcagtatagctaatttttgccaccttgggaggaatggaattctgcctattttcgaattaatcctacagcactcactaaaaactaacagccatggcaccataatacattntgtgaggt

SEQ ID NO: 2569 - DNA, 136 bp, Homo sapiens
cgatgaggcaaccagccagaacgcctgaacgcaggcacatacttcctattctacaccctagtaggctcccttcccctactcatcgcactaatttacactcacaacaccctaggctcactaaacattctactactca

SEQ ID NO: 2570 - DNA, 611 bp, Homo sapiens
acttcctgctggcctggtttcatgcgatcatccaagaacgcttacgatacgcaccactggggtggtcaaagaagtatgaatttggagagtctgacctgcggtcagcttgcgatacggtggacacgtggctggatgacacggccaagggcaggcagaacatctcaccggataagatcccgtggtctgcactaaagaccttaatggcccagtccatttatggcgggcgcgtggacaacgagtttgaccagcgtctgctcaacaccttcctggagcgcctgttcacaaccaggagtttcgacagtgagtttaagctggcatgcaaggtcgacggacataaagacattcaaatgccagatggcatcaggcgagaggagtttgtgcagtgggtggagttgctccccgacacccagacgccctcctggctgggcctgcccaacaacgccgagagagccctccttaccacacagggtgtggacatgatcagtaaaatgctgaagatgcagatgttggaggatgagaacgacctggcctacgcagagactgagaagaagacgaggacagactccacgtccgacgggcgccctgcctggatgcggacactgcacaccacc

SEQ ID NO: 2571 - DNA, 517 bp, Homo sapiens
  misc_feature 70, 73, 166, 196, 292, 322, 357, 406, 468, 479: n = A,T,C or G
acaagcttttttttttttttttttttttttttttttttaaaggtgttagcattaatgttttattgtcacncanatggcaacctgggtttatgtcttcatattttatatttttgtaaattaaaaaaattacaagttttaaatagccaatggctggttatgttttcanaaaacatgattagactaattcattaatggnggcttcaagcttttccttattggctccaaaaaattcacccaccttttgtcccttcttaaaaaactggaatgttggcatgcatttgacttcacactntgaagcaacatcctgacagtcatccacatntacttcaaggaatatcacgttggaatacttttcanagagggaatgaaagaaaggcttgatcattttgcaaggcccacaccacgnggctgaaaagtcaactactacaagtttatcacctgcagcgtccaaggcttcctgaaaagcantcttgctctcnatctgcttcaccatcttggctgctggagtctgacaagc

SEQ ID NO: 2572 - DNA, 258 bp, Homo sapiens
  misc_feature 86, 88, 99, 104, 152, 178: n = A,T,C or G
cttttttttttttttttttttttttttttttaaatttgaccaaaaaaaatttattgtacaattacccaccactggatttgactcananaggacccccanagggngtctccatcttccctatttattttcagcccttgagggcttcattgtanatcaaagccaaggcccccaggaaggngacatactcctggaagttcacctcctggtccttgttccggtccaagtcttccatcagccttgcaatttcagcatcctgca

SEQ ID NO: 2573 - DNA, 210 bp, Homo sapiens
  misc_feature 194: n = A,T,C or G
acatctaaaggcatgaagcactcaattgggcaattaacattagtgtttgttctctgatggtatctctgagaatactggttgtaggactggccagtagtgccttcgggactgggttcacccccaggtctgcggcagttgtcacagcgccagccccgctggcctccaaagcatgtgcaggagcaaatggcaccganatattccttctgccac

SEQ ID NO: 2574 - DNA, 422 bp, Homo sapiens
actaataaaaagcatctgcccctttaccagcaagtcctctactcagaaagaactgacccacgcaagtctgggagagtgactagttcaaatgtgcagggctgaagcttccaaacacagccactattttctgttgtatatcttcatctcaatggtgacatggccactgcccaaggaacttgtggcagggatcccaaggtgaggcagcaacagatgtctgtgaacattgtgcgttaacagtggctcagagcctctagattcacagctctgcatggtgggcttctgccttcaacaactcactgggcttcatgaagatgccttccatggctttccagtagttgttctgacttggctgggccatgccatgcacctctttttgcccactgataggtcgaccatattgttctcctgtgacagacagcagt

SEQ ID NO: 2575 - DNA, 265 bp, Homo sapiens
  misc_feature 101, 104, 130, 138, 187, 217, 258: n = A,T,C or G
gtacaagcttttttttttttttttttttttttttttctaattactaccttttattctaatgtgaaccatggccctgaaagctgataacaagcttggctgancanagggaactaggggtcggcagaaaggnttatgggnggaaaacattggctcttccttggggagtgatgctggggaaagggaaganagtggctcagcctgcaggtaaataggctanaaaagccaaggccaaaggcctggaggggagaggacagtcancatgtcc

SEQ ID NO: 2576 - DNA, 318 bp, Homo sapiens
  misc_feature 82, 85, 108, 140, 144, 163, 207, 251, 307: n = A,T,C or G
tacaagctttttttttttttttttttttttttttttttctagtttaatgtattttaatagcaaacttacaggaacagcacanaanacagacaacattaaaaacatgtncttgcatgtaggacaactcagttagaaaagtntagngaatggatggaatctactntatgataaaaatgctacaaacaccatttagttgccatcaataanaaatttacttgttttaaaaaaatccaaatgctggcattgtccanaaaaatttaacaggtttatttataattattataaagttgaaccgctgaaacttgtncactgaaacat

SEQ ID NO: 2577 - DNA, 234 bp, Homo sapiens
  misc_feature 188, 223: n = A,T,C or G
acaagcacgacgacaacagaaaccttccttcccccagtgttgtagtgagcaaggaatatatttaacttcaaataaaagacaagaacaaatgctggataaagctgacagaaagaagtgcaactgtaggtgctctggcaatatagaaatgatacaactaagaaaaatggaagaaaaggaaagagaaagtnttcctcagaatgattttactgactgctcatctgtnatgcctgggag

SEQ ID NO: 2578 - DNA, 368 bp, Homo sapiens
  misc_feature 196, 223: n = A,T,C or G
accactatgtaggaggtttctatggaggctgcaatgaagccctgatgaagcttgagttggtccatcatgggcccatggcagttgcttttgaagtatatgatgacttcctccactacaaaaaggggatctaccaccacactggtctaagagaccctttcaacccctttgagctgactaatcatgctgttctgcttgngggctatggcactgactcagcctctgntatggattactggattgttaaaaacagctggggcaccggctggggtgagaatggctacttccggatccgcagaggaactgatgagtgtgcaattgagagcatagcagtggcagccacaccaattcctaaattgtagggtatgcct

SEQ ID NO: 2579 - DNA, 346 bp, Homo sapiens
  misc_feature 285, 297, 301, 315: n = A,T,C or G
acaacctaaaatggatgccaaagacttgtgagctctgtctgcttagagttagaacagaaacaaaaacaaatctgaaacagtaagacctcaatacaagaaaacaagtcaccttatctagtataaaataaacattaggataacaaactccacaggattttatttttctaaatacacatttttggacacgatattatgttgaggtttaagttcttcccccttattgtgccttattttcttgtgaaaataaagttcgttctctagggatgtttcagggataaagtttangagaaattcagngttnggctgaaaatccanaggctctgaaaacaaggattccagtggtgag

SEQ ID NO: 2580 - DNA, 202 bp, Homo sapiens
acgacggctcccgcaacccgcgcatcctgctcgcggtcaatgggaaagtcttcgacgtgaccaaaggcagcaagttctatggcccggcgggtccatatggaatatttgttggtagggatgcctccagaggactggccacattttgcctagataaagatgcacttagagatgaatatgatgatctctcagatttgaatgcagt

SEQ ID NO: 2581 - DNA, 375 bp, Homo sapiens
  misc_feature 338, 339, 340, 363: n = A,T,C or G
actttccaagaatgtcaccatctctaaataggaaataatcctgcaagtgaaaaaaaccattagttaagacaactaattgcaaatatctgacttctttttagaattattaagtttacacaccttgtcatctagaactactttggcgcctccatattctgggagaagaactttatctccaactttcacgctaactggttgaatctctccacccttaaaaaaggaaggatgtttattagcaaagatatctagttcacccaacataaacagttaacttttaaatcactacaactaatgaaacatggtcactcaaatccaattatattaaaaatatatttcgnnnctaagtgatacgactcatactanaattacagatct

SEQ ID NO: 2582 - DNA, 472 bp, Homo sapiens
acttatttcaacaattcttagagatgctagctagtgttgaagctaaaaatagctttatttatgctgaattgtgatttttttatgccaaatttttttagttctaatcattgatgatagcttggaaataaataattatgccatggcatttgacagttcattattcctataagaattaaattgagtttagagagaatggtggtgttgagctgattattaacagttactgaaatcaaatatttatttgttacattattccatttgtattttaggtttccttttacattctttttatatgcattctgacattacatattttttaagactatggaaataatttaaagatttaagctctggtggatgattatctgctaagtaagtctgaaaatgtaatattttgataatactgtaatatacctgtcacacaaatgcttttctaatgttttaaccttgagtattgcagttgctgctttgt

SEQ ID NO: 2583 - DNA, 585 bp, Homo sapiens
acttaaaaatactgaattgacagctacattgaatgcagggtttcccagggtagttcttattttgtcacttactccaattacattcaaggtcgttatgcctcatctttttcctgagctgtggcagctctaactggggcacccagagagatacataccaggtaatctccacttctacttttctggtagcttggccctggcaaaatgagccccacaatctagaaagtaggatgctaaacaaagttgaatcaacatatctttttagaaaatatcaggttagagaatactcctgaggacctgtttctaaccagagttgacaaatgtgaaaaatgcatcagctagacagcagtcatgtgaacacagcccggaactgcaagtcaaggaaatgggttctgggcctgccttcccaggtaaccaaaaccattattcaaaagcaactactgaaatgccagcttgtggggaaagaaatgggaaaggtgataaaatcacaattaaatgcatgtatatacatgaataccaaagctattatgtagaaataaaatcaaaacactttagaccaagaagaaatcagagacctcctagtctatt

SEQ ID NO: 2584 - DNA, 392 bp, Homo sapiens
actctgaggcttgtaggagggtaaaatagagacccagtaaaattgtaataagcagtgcttgaattatttggtttcggttgttttctattagactatggtgagctcaggtgattgatactcctgatgcgagtaatacggatgtgtttaggagtgggacttctaggggatttagcggggtgatgcctgttgggggccagtgccctcctaattggggggtaggggctaggctggagtggtaaaaggctcagaaaaatcctgcgaagaaaaaaacttctgaggtaataaataggattatcccgtatcgaaggcctttttggacaggtggtgtgtggtggccttggtacgtgctttctcgtgttacatcgcgccatcattggtatatggttagtgtg

SEQ ID NO: 2585 - DNA, 400 bp, Homo sapiens
acgtgcacatttatgggggttaactatcagaaagtgaatccactttgaggtttataaaatgagaaggggatgatggtggggctgtatgtgttgggcactggtgcctattgcagtcagaattcacactgcttaattgacatcttgctggggaagagagggagatggggtggtgagagaggaagcagatgaaacaaaggaaaacgtagcttgcctgaaattgtgtaattttttttcctcttgattgtataaggcattttgaactggaaaaacgtctttcctacacactcttccaaataatcacagggaatataattgctgattcagaatacaaataagacctctttcatctttctccccactcccccgcaaaatcattctacacaccccaagcccataaagt

SEQ ID NO: 2586 - DNA, 322 bp, Homo sapiens
  misc_feature 171: n = A,T,C or G
cttcagaagagcttgagtaggccaaatgttgaagttaagttttccaataatgtgacttcttaaaagttttattaaaggggaggggcaaatattggcaattagttggcagtggcctgttacggttgggattggtggggtgggtttaggtaattgtttagtttatgattgcanataaactcatgccagagaacttaaagtcttagaatggaaaaagtaaagaaatatcaacttccaagttggcaagtaactcccaatgatttagttttttccccccagtttgaattgggaagctgggggaagttaaatatgagccactgggtgt

SEQ ID NO: 2587 - DNA, 546 bp, Homo sapiens
acatggggaagtgggcaaaagtggataggatgaatttaaagaaaatgactacctttggaaaaaagaaattaaattttgttcacatatcctaccctttcccattgtgcatatcccaagtgtcatatttaaaactaaggttacttaaaacagaatccaggaatatcaaggctctgtggcttggaattttagaggataggactaataaaaggacttttgcaaagaaggcttttttccacgttcactttgttttgcgttctttgaaagtaactgatacttttcgggtagttaattcagcagtccataaatatgatccagtaacttgcttatattttattgaagtctcgacagctcttcagaagtaaatttagaacgatgctgtcagttcatatttatagatattagtgttttagcagataaaacaaaatcaacaaaaattaagttcattttgtgattaaacctgcaaccatttttccattactttttttctatagttaatggttattgccatgatttcttctgtttggttctactaagctagaaagccag

SEQ ID NO: 2588 - DNA, 437 bp, Homo sapiens
ctgaattaagcacagagttgaagtttatacccgtttcacatgcttttcaagaatgtcgcaattactaagaagcagataatggtgttttttagaaacctaattgaagtatattcaaccaaatactttaatgtataaaataaatattatacaatatacttgtatagcagtttctgcttcacatttgattttttcaaatttaatatttatattagagatctatatatgtataaatatgtattttgtcaaatttgttacttaaatatatagagaccagttttctctggaagtttgtttaaatgacagaagcgtatatgaattcaagaaaatttaagctgcaaaaatgtatttgctataaaatgagaagtcccactgatagaggttctttattgctcattttttaaaaaatggactcttgaaatctgttaaaataaaattgt

SEQ ID NO: 2589 - DNA, 489 bp, Homo sapiens
  misc_feature 450, 469: n = A,T,C or G
actttgtggataagaaaatggaggaacacatctgatggagagtgggcatttgacaacaatggaacaggtaaccagcatgtaaaatcaaaatataagtgtctttttaagagctgaaagctgctgctggtcattcattaatgtgtcagacatttaatcaggatgctggaccttcaaaataactgaaaaaagaaccaagaaaaggcgtttttgttttcaacaaactttactaaataaccctggaaaggcaatgaacgatctgacaatttaagctctaatgatttaaagctcagctagaagaaagtgaggcatgacatatactgtcaacggagggtgaaggaggcagatttctggaaatgcaatgatcccacacatttgcttcaaggagaaacctgcagacatattttcaggtcttgctaagtaacaactgtttatttgtaatcaatacatttngggaaagtctgctatgtanctaaggtcactgtgaccaca

SEQ ID NO: 2590 - DNA, 246 bp, Homo sapiens
atacatctgaatgaaaagcaaagctaaatatgtttacagaccaaagtgtgatttcacactgtttttaaatctagcattattcattttgcttcaatcaaaagtggtttcaatattttttttagttggttagaatactttcttcatagtcacattctctcaacctataatttggaatattgttgtggtcttttgttttttctcttagtatagcatttttaaaaaaatataaaagctaccaatctttgt

SEQ ID NO: 2591 - DNA, 221 bp, Homo sapiens
  misc_feature 105, 117, 209, 216, 219: n = A,T,C or G
gccgcctaaggacgacaagaagaagaaggacgctggaaagtcggccaagaaagacaaagacccagtgaacaaatccgggggcaaggccaaaaagaagaagtggtncaaaggcaaagntcgggacaagctcaataacttagtcttgtttgacaaagctacctatgataaactctgtaaggaagttcccaactatccccttataaccccanctgtggnctntg

SEQ ID NO: 2592 - DNA, 403 bp, Homo sapiens
accacaacttgagtcatttctatcatgtttcactattatacatttgtatgtggatacttgctttctgatttctttaccctgaatttttagaagtagaaattaccttgttaatggcttccagcacttttatggctttgataaaggactttccagtgttgttataatttatggtgtgaatatatcagctttaacataattctcatctttgggtgtgattttttaaagagaagaaataaaatattgtaatcctgtagttgtttatatccaagtttaaatacagtatctattattttgtccagatgctttgggaaaatggaattaatggcattttagcagatgaaatgggattgggtaagacagttcagtgcattgctactattgcattgatgattcagagaggagt

SEQ ID NO: 2593 - DNA, 83 bp, Homo sapiens
  misc_feature 55: n = A,T,C or G
accaccgtgccaccttggtcccctcaaccctgggggtaggagggcactgccccancgagggaaaatagaaaagattttaaaaa

SEQ ID NO: 2594 - DNA, 359 bp, Homo sapiens
  misc_feature 143, 358: n = A,T,C or G
gagcggccgcccggcaggtacatccccagataaaatgagtataggccagtctcctttggctttgtggattctttccaaaaattttccagactatttagctttccttgtgtagttacagctcaaattagaaactgaagaaacancaagtggccaggcagggtagaaagcaaataaactgagctacctgtgcctttttccaaatcagtatatgtgcttggctcctgaaaaaaaaaattctgatatgtaggcattctcattacttagtgagatattagtgaagacctttcaacgtataacacacagtaactgttgcatagttttaataaacacttgaattttccaggaatgtgactgctgng

SEQ ID NO: 2595 - DNA, 343 bp, Homo sapiens
  misc_feature 311: n = A,T,C or G
gttacagaccaaggagaactggagaaagaaagagaaaatcagttcgtggttgcattgtggatgcaaatctgagcgttctcaacttggttattgtaaaaaaaggagagaaggatattcctggactgactgatactacagtgcctcgccgcctgggccccaaaagagctagcagaatccgcaaacttttcaatctctctaaagaagatgatgtccgccagtatgttgtaagaaagcccttaaataaagaaggtaagaaacctaggaccaaagcacccaagattcagcgtcttgttactccacgtgtcctgcancacaaacggcggcgtattgctctgaagaagca

SEQ ID NO: 2596 - DNA, 295 bp, Homo sapiens
  misc_feature 171: n = A,T,C or G
acatcatgttattttattattattatttgcttttcatgtagaactcagcagttgacatccaaatctagccagagcccttcactgccatgatagctggggcttcaccagtctgtctactgtggtgatctgtagacttctggttgtatttctatatttattttcagtatactntgtgggatacttagtggtatgtctctttaagttttgattaatgtttcttaaatggaattattttgaatgtcacaaattgatcaagatattaaaatgtcggatttatctttccccatatccaagt

SEQ ID NO: 2597 - DNA, 311 bp, Homo sapiens
  misc_feature 258, 268, 269, 301: n = A,T,C or G
ctcagcctctgggatggattactggattgttaaaaacagctggggcaccggctggggtgagaatggctacttccggatccgcagaggaactgatgagtgtgcaattgagagcatagcagtggcagccacaccaattcctaaattgtagggtatgccttccagtatttcataatgatctgcatcagttgtaaagccgaattggtatattcacagactgtagactttcagcagcaatctcagaagcttacaaatagattnccatgaaganntttgtcttcagaattaaaactgcccttaattntaatatacct

SEQ ID NO: 2598 - DNA, 255 bp, Homo sapiens
actgatgaaaatctctagtggataatcataacactctcggtcacatgtttttccttcagcttgaaagcttttttttaaaaggaaaagataccaaatgcctgctgctaccacccttttcaattgctatcttttgaaaggcaccagtatgtgttttagattgatttccctgtttcagggaaatcacggacagtagtttcagttctgatggtataagcaaaacaaataaaacgtttataaaagttgtatcttgaaaca

SEQ ID NO: 2599 - DNA, 333 bp, Homo sapiens
  misc_feature 184, 193, 270, 271: n = A,T,C or G
acaaattttttatttgatcatacttaaaaagacagagcagaatcacattcattttcttaatagtatcactgtaaacatagcgaattttggcgcttttagattgctctgaaaatttctgaagagttgaccatagcagcctggtaagccttttcctttcccccaaagctctcctgccctttgcacnaagactgtnggtgacaactgatgctaactaaatagcatgtggttgagcttgccaaatccttccacctcctcccataggcaacaggnngacttggcttaaaggcattgagtaagcaagtaggttatcagagaacagagggaagattccat

SEQ ID NO: 2600 - DNA, 558 bp, Homo sapiens
acggtagaactgctattattcatcctatgtgggtaattgaggagtatgctaagattttgcgtagctgggtttggtttaatccacctcaactgcctgctatgatggataagattgagagagtgaggagaaggcttacgtttagtgagggagagatttggtatatgattgagatgggggctagtttttgtcatgtgagaagaagcaggccggatgtcagaggggtgccttgggtaacctctgggactcagaagtgaaagggggccattcctagttttattgccatagccattatgattattaatgatgagtattgattggtagtattggttatggttcattgtccggagagtatattgttgaagaggatagctattagaaggattatggatgcggttgcttgcgtgaggaaatacttgatggcagcttctgtggaacgagggtttatttttttggttagaactggaataaaagctagcatgtttatttctaggcctactcaggtaaaaaatcagtgcgagcttagcgctgtgatgagtgtgcctgcaaagatggtagagt

SEQ ID NO: 2601 - DNA, 482 bp, Homo sapiens
acaagtattcttgatctcagagacaagttcaatgaatctcttcaagtgaatactactgctctcatcccaaaggaagccaactctgaggaagtctttttgtttaaaccagaaaacattacttttgaaaatggcacagatcttttcattgctattcaggctgttgataaggtcgatctgaaatcagaaatatccaacattgcacgagtatctttgtttattcctccacagactccgccagagacacctagtcctgatgaaacgtctgctccttgtcctaatattcatatcaacagcaccattcctggcattcacattttaaaaattatgtggaagtggataggagaactgcagctgtcaatagcctagggctgaatttttgtcagataaataaaataaatcattcatccttttttttgattataaaattttctaaaatgtattttagacttcctgtagggggcgatatactaaatgtatatagt

SEQ ID NO: 2602 - DNA, 525 bp, Homo sapiens
acacatacatttttgcctatagctagcaattatttcattcagatacacacacacacacacacacacacaggctacttaaaatagagagtgacttgagatatacaaaaacaggaagaaaagccctggaggtcatatagctaatgtataactgcacagcaagcagctatgtctaaagctaacaataaaaagaaaatgtgggagttgtgcaattagttttattctcattttttggaagaatatgttcctggtttctctaactaaaaggaaaaaattcaaaggaaagttgtaaatattaggaagtaactgaaaaataagaagcaagataaagtggggaggctatgagatcatataatgagctaataaacttttcaacaggggacacctgttctcccttctaactgaagacactaaagagaagctaagatcctatctttcaatcatttagtaattcataaaatcccattatttcataactcaaagtttacctttgaggttgtatgtttacctcatttgaactcgaaatag

SEQ ID NO: 2603 - DNA, 383 bp, Homo sapiens
acataagcatttatttgaggcagatacagtgctgtgggacccctaggctaacagcatcaaaaccaatttttcagagactccattccataggaattactcaaagatccactaacacctgaagcaaagcagagaatctgttaccaccttgcagcaatccaagatctcactagaaaatatgttactaaagttgtatgtaatatgcttacagatcacagtgaaagtatatcgaatggcaaggtggactatataggctcttaattcaatctcactactttctattactagagaactggtcagcatcttctggcaggatactgcataaaacagtcaactgtgctctcccggcactgcatgtggctttgggtaacaatgtggattattag

SEQ ID NO: 2604 - DNA, 559 bp, Homo sapiens
acagtgcagtatgcctaggttatcccatatcacaataaaaaaaagtctgctggtctgcctactagtgatataaaatggcatcatatcctaaagctctttattgtgaaagtatgtttcttccacacaaccaaccagttaagtatgagaattctagtagggatgtagattaacctttcatctaatagttttggcatcaaaattctttaatattgattgttttacattaacctttcaactttctaacatctgaactttttaaatgttcaaaaacatttgttttccacaaaccataaagttttacaaaagtaagattcactttcataatgctggcagacttactccttaatttaaggaatgtgagcaccttccttctttttgactttgtctaaaaccctgtaaggaaaataaaggaagttaaaaaaaaatagctatatagatatagatagctatatatagatagctttatatggatgttaaaaagcattttgtttcacaagacattttacttattttattcaacaaaatatgatcagaaattaagttgatagtcttttaatgt

SEQ ID NO: 2605 - DNA, 430 bp, Homo sapiens
  misc_feature 137, 158, 160, 226, 229, 231, 297, 310, 325, 350, 372, 374,415: n = A,T,C or G
acaagctttttttttttttttttttttttttttctttttcttaataaattttattttggtaattgtaaaaagaaaaatcaggaccaaaactaaaggcaacttaaaaagttcaaatatataatccttatgtgataganatttataatttccaggccctntntggggaaggaatgcccaaagggcaaaagggaaggcaacaatgccatcacacaattcagtcaatcanaananaagctggtaggagagttcaacagggcatgaagaaagggagagaacagcaatagttctgccatacanaactcagtccatnttgaggttaacatanatataccggatgaactttagggaanaaaaaaaggagatggtgcccancntgaggaagaagacataaccagtgagtaaggagtagccgaanaactctactgtctgt

SEQ ID NO: 2606 - DNA, 617 bp, Homo sapiens
  misc_feature 458, 478, 608: n = A,T,C or G
actgattgttttacttcacaacattattgatttaacaatagcctgagctttggggctctgcactgcgttcattgtaatccgtgatacaatgactacaaatgtgtcgcgatttctaatcttcatctgtatctcaggcgattttccagggcttccattctctgtgtcatttcttctagtaaatctcaaattaaggaagatgaagaattgtctatttttatttacatttaaatataacttgatttatccacgtaaaattttggcttctgaaatctaaaaggttttggttttttttcccatttctgtcaagtatgttaaaaccctgacttgtaaatttgtagaactcatttaacatattctgtcaagacaaatattttgggttttttttttttttaacatcagcaaagccagatggctcagtgtgaatttgtctttttaattttaattttatttatttttgntttttttctctttttttganacagagtttcgctcttgttgcccaggttggagtgcaatggcgcgatcttggctcactgcaacctccgcctcctgggttcaagcgattctcctgcctcagcctcccgagtagctgggattacaggcatgcnccaccacgc

SEQ ID NO: 2607 - DNA, 505 bp, Homo sapiens
  misc_feature 39, 75, 118, 130, 175, 207, 262, 271, 300, 309, 313, 321,329, 343, 353, 379, 401, 417, 454, 490: n = A,T,C or G
cttttttttttttttttttttttttttttttttttaacngataattctttattactaaaggtttatttacatagngtttaaagcataataaaaaataaattacaatacaaaagtgctntttaggaagganacactaaacaacaggcccatattaccccttgactatttacccaanacataagctacaaattttgccggaaaaactgnccatacatttttaactacttcttcattattcttatggaccatcatccaggacatntgtttgaanaaatatccagttataatattttcaaaggntagaattgngaanaaaaaatntaaaatgngattaaaggatatntagccttcanatgtaatttacagttttaaaattgcnctttaaaactttgcttttttanacagtttaaaaggcanaatgagacagatttgtaatgaatttcaaaactgaggntcatatgtaaatcatacaattttttaaaaaataggnttggaaaaatatcaa

SEQ ID NO: 2608 - DNA, 539 bp, Homo sapiens
actgcagtaaaagctttaacaggtggaattgcccacttattcaaacagaataaggttgttcatgtcaatggatatggaaagataactggcaaaaatcaagtcactgctacgaaagctgatggcggcactcaggttattgatacaaagaacattcttatagccacgggttcagaagttactccttttcctggaatcacgatagatgaagatacaatagtgtcatctacaggtgctttatctttaaaaaaagttccagaaaagatggttgttattggtgcaggagtaataggtgtagaattgggttcagtttggcaaagacttggtgcagatgtgacagcagttgaatttttaggtcatgtaggtggagttggaattgatatggagatatctaaaaactttcaacgcatccttcaaaaacaggggtttaaatttaaattgaatacaaaggttactggtgctaccaagaagtcagatggaaaaattgatgtttctattgaagctgcttctggtggtaaagctgaagttatcacttgtgatgt

SEQ ID NO: 2609 - DNA, 487 bp, Homo sapiens
acatataaatgaatctggtgttggggaaaccttcatctgaaacccacagatgtctctggggcagatccccactgtcctaccagttgccctagcccagactctgagctgctcaccggagtcattgggaaggaaaagtggagaaatggcaagtctagagtctcagaaactcccctgggggtttcacctgggccctggaggaattcagctcagcttcttcctaggtccaagccccccacaccttttccccaaccacagagaacaagagtttgttctgttctgggggacagagaaggcgcttcccaacttcatactggcaggagggtgaggaggttcactgagctccccagatctcccactgcggggagacagaagcctggactctgccccacgctgtggccctggagggtcccggtttgtcagttcttggtgctctgtgttcccagagacaggcggaggttgaagaaaggaacctgggatgaggggtgct

SEQ ID NO: 2610 - DNA, 289 bp, Homo sapiens
gccgatatcactggaagatattcaaaccgtctctatgcttacgaacctgcagatacagctctgttgcttgacaacatgaagaaggctctcaagttgctgaagactgaattgtaaagaaaaaaaatctccaagcccttctgtctgtcaggccttgagacttgaaaccagaagaagtgtgagaagactggctagtgtggaagcatagtgaacacactgattaggttatggtttaatgttacaacaactattttttaagaaaaacaagttttagaaatttggtttcaagtgt

SEQ ID NO: 2611 - DNA, 567 bp, Homo sapiens
tgcttttgccactttcaagattttaacttctcaggttattaatcaaaattattgtataagttagccaatagaatttttaggttaaaacaacagatggggggtttgtggagtgtttaatgtcatgggcatttttagtagcatagaccctttgttctgcatttgaatgtttcgtatatttttgtttcacagttaatcttccctccccaagtttgctattcaaatcaactgcctgaatgacatttctagtagtctgatgtatttttctgaggaatagtttgtgattccaatgcaggtgtcttcattaccattacctctacactgcagaagaagcaaaactcctttattagaattactgcacatgtgtatggggaaaatagttctgaaaggctagaatgatacaagtgagcaaaagttggtcagcttggctatggagtggtggcaataatctctaaacattccaaaagaccatgagctgaacctaaactcccttggaatctgaacaaaggaatataaaattgccatttgaaaactgaccagctaatctggacctcagagatagatcagcca

SEQ ID NO: 2612 - DNA, 94 bp, Homo sapiens
ctcgagcagtctagaagagtgcatctccagcctatgaaacagctgggtctttggccataagaagtaaagatttgaagacagaaggaagaaactc

SEQ ID NO: 2613 - DNA, 305 bp, Homo sapiens; identical to SEQ ID NO: 2157

SEQ ID NO: 2614 - DNA, 418 bp, Homo sapiens
  misc_feature 251, 358, 386: n = A,T,C or G
ctttctgaacttcaaagcctatttagagaacttcctttgaacattttcttttcttttcttttttttttttttttttggctctagagggggtagagggggtgctatagggtaaatacgggccctatttcaaagatttttaggggaattaattctaggacgatgggcatgaaactgtggtttgctccacagatttcagagcattgaccgtagtatacccccggtcgtgtagcggtgaaagtggtttggtttanacgtccgggaattgcatctgtttttaagcctaatgtggggacagctcatgagtgcaagacgtcttgtgatgtaattattatacgaatgggggcttcaatcgggagtnctactcgattgtcaacgtcaaggagtcncaggtcgcctggttctaggaataatgggggaa

SEQ ID NO: 2615 - DNA, 507 bp, Homo sapiens
acctttttttaaggagtgtaaactatgatatatgatttaagtaatcacttatttgaatgcaatattgattcagataggcataatctattcatttttcataatgaaatgtatattccaatttcaacactttatgcagattttacttatttcttacagggctgctgtgtggattcaatggcttatctatgtaagtgtccagcacagtatctggcacatagtaagcttttagtgtatgctacttatttatattaagtgagtcaatctgtcacttataatagaaaaactatctaatgcctcaggagaataatcaaaagataaacctacagatgtgtgacttctgttaaagtattatgcatccactatttcccaaattactaaactaattgtttaaaatgttacaatctatttttaagatcatatttgttctctatgtttttgctatggcctttggcctaaaccaatacaattctgacaggacattatcagaaaaccacataaaaacaatgt

SEQ ID NO: 2616 - DNA, 439 bp, Homo sapiens
actgaatatctggcagagaggctggaatccttcagccccagagcccagggaccactccagtagatgcagagaggggcctgcccaggggtcagggcagtgggtatcactggtgacatcaagaatatcagggctggggaggcatctttgtttcctggtgccctcctcaaagttgctgacactttggggacgggaaggggtagaagtagggctgttccttttggagctggagggaatagacctggagacagagttgaggcagtcgggctgtccaggttctaagcatcacagcttctgcactgggctctgaggagattctcagccagaggatcccagcctcctcctccctcaaatgtcagtccaagcaaataccaaagcaacgcatcgattttgtggaagtcaattagagatgtggggagctatcggagacaagcactattgt

SEQ ID NO: 2617 - DNA, 600 bp, Homo sapiens
  misc_feature 566: n = A,T,C or G
accaagggatggaagaagtaaatatagctcaggtagcactttatactcaggcagatctcagccctctactgagtcccttagccaagcagtttctttcaaagaagccagcaggcgaaaagcagggactgccactgcatttcatatcacactgttaaaagttgtgttttgaaattttatgtttagttgcacaaattgggccaaagaaacattgccttgaggaagatatgattggaaaatcaagagtgtagaagaataaatactgttttactgtccaaagacatgtttatagtgctctgtaaatgttcctttcctttgtagtctctggcaagatgctttaggaagataaaagtttgaggagaacaaacaggaattctgaattaagcacagagttgaagtttatacccgtttcacatgcttttcaagaatgtcgcaattactaagaagcagataatggtgttttttagaaacctaattgaagtatattcaaccaaatactttaatgtataaaataaatattatacaatatacttgtatagcagttttctgcttcacatttgattttttcnaatttaatatttatattagagatctatatatgta

SEQ ID NO: 2618 - DNA, 376 bp, Homo sapiens
  misc_feature 364, 366: n = A,T,C or G
actctgaggcttgtaggagggtaaaatagagacccagtaaaattgtaataagcagtgcttgaattatttggtttcggttgttttctattagactatggtgagctcaggtgattgatactcctgatgcgagtaatacggatgtgtttaggagtgggacttctaggggatttagcggggtgatgcctgttgggggccagtgccctcctaattggggggtaggggctaggctggagtggtaaaaggctcagaaaaatcctgcgaagaaaaaaacttctgaggtaataaataggattatcccgtatcgaaggcctttttggacaggtggtgtgtggtggccttggtatgtgctttctcgtgttacatngngccatcattg

SEQ ID NO: 2619 - DNA, 76 bp, Homo sapiens
acagtcattcctttagcaaacacagcatctagcagaaacttgcatggctcttgttcattgaccaaaagctggtata

SEQ ID NO: 2620 - DNA, 253 bp, Homo sapiens
  misc_feature 36, 74, 90, 108, 126, 130, 134, 136, 149, 166: n = A,T,C or G
acaagctttttttttttttttttttttttttttttngaaattcaagtaactttatttaaattcaaaaacaattnttaaaactgcatttanagtcaagacccttttgtnttataaaaatcacaagtntttntaananacaaaaatacttntaggttaactagaccanatctgactttggactttattctttaaacaaattgcagagaatagagaaaaaaataggttatttacagaaaacaatatctacatatgt

SEQ ID NO: 2621 - DNA, 540 bp, Homo sapiens
  misc_feature 512: n = A,T,C or G
acacagattcccctttcagcagtcaacttgcctttcttttttttcttttctttttctttcttttgagacagagtcttgctctgttgcccaggcttgcgtgcagtggcatgatctcagctcactgcaacctccgcctcctaggttcaagtgattctcctgcctcagcctcccaagtagctgggattgcaggcacgtgccaccacgcctggctaatttttttgtatttttagtagagacggggttgcttttctattcccaagtccaaaagcctatgaagagggccagcgcaatggctcatacctgtaatcctagcactttgggtggccaagacaggaggactgcttgaggcctcacgtcaagttcaacatcagcgtgggcaacaaagtgagaccctgtctctacataaaagtaaaatcaaaagtctctggagagaattgtgttggtccagctcgggttagttgtccattcaaccggtgatacaggcagagttggggagtcatggcttctgaagncccacagtatcgactgggagcaggtctc

SEQ ID NO: 2622 - DNA, 453 bp, Homo sapiens
  misc_feature 355: n = A,T,C or G
acgtggactcagagcacagagaaaagaaactaaaatgccttttggcatttcaagatatttggcactcttgtgattacatttttttacagtccattaaagagaataaactgacataatattagagaaataaacaggctgctcacacaacagactgcaaggggaagttagaaaaagctcaagcatttttttctttgtttttcgtgtgtgtgtgtgtgtgtgtgtgtgtgtgtgtgtttttctgacataaaaaatgtgtccatttgcattaacttgggcagatagcttgcagcaacaaagaaacacaagctttacaactcattttaaaataaaatcttttctatgtatcattccttanaaaagttctcttcttgttttaaacacattcctgataacttctaaagatgaccaaaataaaacagaatatctacagagatcattttctgaattttttgt

SEQ ID NO: 2623 - DNA, 415 bp, Homo sapiens
acttcgagtcttgtaggagggtaaaatagagacccagtaaaattgtaataagcagtgcttgaattatttggtttcggttgttttctattagactatggtgagctcaggtgattgatactcctgatgcgagtaatacggatgtgtttaggagtgggacttctaggggatttagcgaggtgatgcctgttgggggccagtgccctcctaattggggggtaggggctaggctggagtggtaaaaggctcagaaaaatcctgcgaagaaaaaaacttctgaggtaataaataggattatcccgtatcgaaggcctttttggacaggtggtgtgtggtggccttggtatgtgctttctcgtgttacatcgcgccatcattggtatatggttagtgtgttggttagtaggcctagtatgag

SEQ ID NO: 2624 - DNA, 372 bp, Homo sapiens
ggcaggggcccttagagtcttggttgccaaacagatttgcagatcaaggagaacccaggagtttcaaagaagcgctagtaaggcctctgagatccttgcactagctacatcctcagggtaggaggaagatggcttccagaagcatgcggctgctcctattgctgagctgcctggccaaaacaggagtcctgggtgatatcatcatgagacccagctgtgctcctggatggttttaccacaagtccaattgctatggttacttcaggaagctgaggaactggtctgatgccgagctcgagtgtcagtcttacggaaacggagcccacctggcatctatcctgagtttaaaggaagccagcaccatagcagagt

SEQ ID NO: 2625 - DNA, 396 bp, Homo sapiens
acatgtggggtggagaggcagggatgtgtagggaaacagatctattaggatgatggaattatataagggagtggtggtaaaggaagtaaaaaagattagtaaagagaagaaatgtgaacttatctaatacaccacagtaggcccctgtgtcttcttgagtaggcgagtgaactagattttaggaaggtaatgaggcagtcatatgcaagaaagatttcaaagactggcaacaaggggtcaagcaggactttgagcagttgttgaggtttatgggaatggagagaatgacacaagtgtgagatgttaaaaaaggaccaagaggctttgacaatgtattgaatctgggaaacaaatgagcagagggtggggataattatatctaagagacagtggcgt

SEQ ID NO: 2626 - DNA, 371 bp, Homo sapiens
  misc_feature 29, 328: n = A,T,C or G
ctttttttttttttttttttttttttggnggtaaaatgcaaatgttttaaaatatgtttattttgtatgttttacaatgaatacttcagcaaagaaaataattataatttcaaaatgcaatccctggatttgataaatatcctttataatcgattacactaatcaatatctagaaatatacatagacaaagttagctaatgaataaaataagtaaaatgactacataaactcaatttcagggatgagggatcatgcatgatcagttaagtcactctgccactttttaaaataatacgattcacatttgcttcaatcacataaacattnattgcaggagttacacggccaatcattgaaaattatgatcttt

SEQ ID NO: 2627 - DNA, 311 bp, Homo sapiens
agcggagcagcgctggccgcgtgccgcctccggagccggcagcccccatggctgggggttatggagtgatgggtgacgatggttctattgattatactgttcacgaagcctggaatgaagccaccaatgtttacttgatagttatccttgttagcttcggtctcttcatgtatgccaaaaggaacaaaaggagaattatgaggatattcagtgtgccacctacagaggaaactttgtcagagcccaacttttatgacacgataagcaagattcgtttaagacaacaactagaaatgtattccatttaaagt

SEQ ID NO: 2628 - DNA, 442 bp, Homo sapiens
acaggaaatgtgctttcctctaaatggtcaatgtaaagaatcttaaggatatttcttgtgttgaaatttacattcgattttgtgattacacttggaaatatgtgttaaattgggtttttaattgtagcccaaaggtgcattaagcaagtgtaacattttttccacataaaacttagaaaactttagttacctgaaaagcaaggattctttactaattattatgctcattcttgatttgacttccatgttcacacttcaaagtgtaagaggaagcactagaaactggcattattgttgcactaaaaaagtctataaatcataatagcaccatgaggtgttttgcaatgagacaagcatgaagaatgaatttctttaagagagaaacacaaccggaggtgatttatataaaccaaaagaaaaaaaaggctttaaggtattaggt

SEQ ID NO: 2629 - DNA, 349 bp, Homo sapiens
ctcttgtccctctgtcctgcccccacagctgctgctcacttatcctgccatactgggaaagggggttcccccacgatggcttattctgggtccagactttccccaggtagggaaagcggaaggtagaaggctttttttgctggctctagggttcttctagttcgaggccttgggtccccatcctctggaaccagggggaggcctggaaggagttcactgtagacccgtcccatggggaaagaggctgcggacttgctgctgctgctgctgccagtggcctcttctgggtgccaggagaggggaaggacctttgtctgggcgttaccaagggctggaaactttacctggt

SEQ ID NO: 2630 - DNA, 145 bp, Homo sapiens
accttcccactggcctcaagtgagccaagaaacactgcctgccctctgtctgtcttctcctaattctgcaggtggaggttgctagtctagtttcctttttgagatactattttcatttttgtgagcctctttgtaataaaatggt

SEQ ID NO: 2631 - DNA, 167 bp, Homo sapiens
acctgtgcacatttcaagatagcagcactcagtccatgccctattatccatcttaaaagttcacacattattgtttactgaataatatttctactgtctttacccccaaacattgcaaaacctgcaatggaacaatgctgtgagttataatgtagaaattttttttt

SEQ ID NO: 2632 - DNA, 303 bp, Homo sapiens
  misc_feature 290, 294: n = A,T,C or G
acacgcttttggccccgaccaatgaggccttcgagaagatccctagtgagactttgaaccgtatcctgggcgacccagaagccctgagagacctgctgaacaaccacatcttgaagtcagctatgtgtgctgaagccatcgttgcggggctgtctgtagagaccctggagggcacgacactggaggtgggctgcagcggggacatgctcactatcaacgggaaggcgatcatctccaataaagacatcctagccaccaacggggtgatccactacattgatgagctactncatnccagactca

SEQ ID NO: 2633 - DNA, 341 bp, Homo sapiens
  misc_feature 248, 249: n = A,T,C or G
atcagaatgaagttgtgccttctaattatggttcaatgcattgaaatataggaaatgcaataattttccattttcatattttttaattgccaatttatattgttatgttttgttttctgcctccttgatcatgctgctagaaaggggtcaactttaggctttttattccctattatagttggttttctacctggttgattgttaatcttaattatttcctttcttttaattatttatattaaatttgnngttttaacttcttgtaaattgagatagaagctatgggaattattttattttaaatttgctttttttaattgtatttgcaatgacataattgt

SEQ ID NO: 2634 - DNA, 291 bp, Homo sapiens
  misc_feature 22, 26, 87, 106, 107, 160, 220, 257, 272: n = A,T,C or G
gattttctttgttctaacagtnttanatggcctgtttgctctttctaaatataaaatcataggtatttctattttgtttttgtgttncataaaattgtaataagtnnttttgatattttttcattacatatgaagttaattgttggttttaaacaaatgntctttgttaggataacagaaataacatcttctattcttgtttgttggaagctaaaagctngataaaaggaattggtgtcttttgatacaatcaaatntttatcacttaaatngcctaatatgattataata

SEQ ID NO: 2635 - DNA, 485 bp, Homo sapiens
gcgaaaggtgtgatggatgtcagatgtttcctatcaatggatccagattcaaatgcagaaactgtgatgactttgatttttgtgaaacgtgtttcaagaccaaaaaaacacaataccaggcatacatttggcagaataaatgaaccaggcttcagcagaagaaacacttcctataaatctcgcccaaacaggaaaggagaagcattagggtgtccgactacgtgggtttcatagctgtggaaaagccaaaggggagactcctgaagaaaggcggtgaagactgtgaagagcgggtcaggaagatgagcacagcactgctactcctgtgggcacagggacagcatgtctccagccagcgccaccttgtttaatacatgggaactcactgaaattcattctgtattttgcccgcaaagttttaaagctttcatccacagtcaggaattaaacttataccaatgagagcctcacacattcaaggatgt

SEQ ID NO: 2636 - DNA, 421 bp, Homo sapiens
actaaaataggcttttgcttgttttaaaagcaattctagatgaggttatatttttacaatactgtatctcatctcaaataaatttatacattctttaccctgtctaaacttgcatgcaaaataagaaccagcaagccttcaaacttcaatcacagtattccataggctatattttaagtctattgcattagttgaaatttattttgcagagtatgttaacaaacatattctaacacttaaaaaatcattacaatttttctgtttttgtcttctaaattactctgagcagtgaattactggagggaagatacccatgtctaaaatttgtgtctggtgccagtctcagatttctgccaaacaccagtaggtattcaaaagtgtggtccctttaaaacagcaggccggatatcacctttctgtc

SEQ ID NO: 2637 - DNA, 460 bp, Homo sapiens
actgcctatttggggtatcatcattcttcgggggccccacagggaaccttttgctcaccggggccagcttgtcagtctcctgagagctgccttgattcaaatgctctttgatggcctgctcaatttgttcctcttcctgcaggtcatcttcagatgagccttgaccaggaactcgcttcacttggtttgaattaatgatctcagggtatttaactagcatcctggccaagtactcacctaattcttgatccttgtcgttcaggctttcatatgccatctgtctgttttcaacatgtggaatccaggcagctttgggaagctggttcgatctagatcttccagcaccataagggagccttggcagaactttctcctggttatatggattgggaaaatacgacgttttctgatttgctgcactctccatccctaaaagatttaaaatatcctcaacactgag

SEQ ID NO: 2638 - DNA, 557 bp, Homo sapiens
  misc_feature 508: n = A,T,C or G
acctattgccaggaagataggcagctcatctgtgtcctgtgtccagtcattggggctcaccagggccaccaactctccaccctagacgaagcctttgaagaattaagaagcaaagactcaggtggactgaaggccgctatgatcgaattggtggaaaggttgaagttcaagagctcagaccctaaagtaactcgggaccaaatgaagatgtttatacagcaggaatttaagaaagttcagaaagtgattgctgatgaggagcagaaggcccttcatctagtggacatccaagaggcaatggccacagctcatgtgactgagatactggcagacatccaatcccacatggataggttgatgactcagatggcccaagccaaggaacaacttgatacctctaatgaatcagctgagccaaaggcagagggcgatgaggaaggacccagtggtgccagtgaagaagaggacacatgaaggcttgctacccccagtggaaaatcatcccctncccttgtgtgtatgtgacagcgtgtatgtaacggcttctgatttctgtg

SEQ ID NO: 2639 - DNA, 583 bp, Homo sapiens
accattcttatcagtcaggagatgacacgtggtaaatttctcttcttgattttcctcttgattatactcacataagggagctccatttggtaacaaagatgaaattctgttcacagttaacaagaatttagcaacttcttgcttggcaaaatctgagacaaccttacaaaaacatcctacattaaattcagaattttgggtagctgcataagctgaagattatggaaaacctgagctgaaaatggcacctggatctgtaacttcttgtcttgaactcttttttgagctttattctgtgagagatcttcccctacagtgattttttctgtttctcctcagtcgctggggtctcagtaaggggtggaggattggtgtaaatgagacagtcacataaattgtctaatttgagcatgccaagtgatttttgtcagcctcttttggtcataaaattttggtatagctattgtgaaatatagtgtcataaatttgtcataagccattaatgaaggaagagaagcagaaatttatttctgtgggaatgcactcaaatatcaagcagatggtgttctacaacatttatttg

SEQ ID NO: 2640 - DNA, 289 bp, Homo sapiens
cttgtggtataaccatagaccatagctgcaggttaaccaattagttactatcgtagagtaatatatattcagaataataaactcaagctggagaaatgagtcctgatagactgaaaattgagcaaatggaagaagatacagtattgtttagatcagaatcattaaaaaatatttttgtttagtaagtttgaagatttctggcttttaggccttttctattttgttccatttatttttgcaggcaatcttttccatggagggcagggtatccattctttaccatgggtgt

SEQ ID NO: 2641 - DNA, 537 bp, Homo sapiens
acctggagggatgcaagacttcaattaccttagcagcaactgttttgagatcaccgtggagcttagctgtgagaagttcccacctgaagagactctgaagacctactgggaggataacaaaaactccctcattagctaccttgagcagatacaccgaggagttaaaggatttgtccgagaccttcaaggtaacccaattgcgaatgccaccatctccgtggaaggaatagaccacgatgttacatccgcaaaggatggtgattactggagattgcttatacctggaaactataaacttacagcctcagctccaggctatctggcaataacaaagaaagtggcagttccttacagccctgctgctggggttgattttgaactggagtcattttctgaaaggaaagaagaggagaaggaagaattgatggaatggtggaaaatgatgtcagaaactttaaatttttaaaaaggcttctagttagctgctttaaatctatctatataatgtagtatgatgtaatgtggtcttttttttag

SEQ ID NO: 2642 - DNA, 464 bp, Homo sapiens
actgccactgtcataaccaataccatgaatgaatatactttaaattttggtgataactgttccccatttttttttgaaccacagtctcactctcacccaggctggagtgcagtggcacaatctcagctcactgcaagctccgcctcctgggttcacgccactctcccacctcagcctcccgagtagctgggactacaggcgtgcgccaccatgcccagctaattttttgtacagctgtgtagtaaagatgccttctggtgaatttgcacgtatatgccgagatctcagccatattggagatgctgttgtaatttcctgtgcaaaagacggagtgaaattttctgcaagtggagaacttggaaatggaaacattaaattgtcacagacaagtaatgtcgataaagagggggaagctgttaccatagagatgaatgaaccagttcaactaacttttgcactgaggt

SEQ ID NO: 2643 - DNA, 278 bp, Homo sapiens; identical to SEQ ID NO: 1714

SEQ ID NO: 2644 - DNA, 435 bp, Homo sapiens
acctatgattacaagagtgcagggaggagatacttgcacgaggcaaatcctgtggttaatgcaccaaagcttccaaaaatctaactcttcctctacatcttactgttctgcccgggattcgtattatagtgacagaagaaatgttgtttagactattatttttgttcgactctaaaagatttgccaaataacaaaagcatacaatgcatactgttggagaacaagaatgctactgtattttacatctttatttcttggtgaaacaaaagttttaaaagtagttttaacaactttacactggaatgatttagctttgttattgcatgtcttgtgttaagtgttttgtatatgatattgcagttttactaggcaaatcttcaaaagatgcactttaggaaacgaaatatttcctaaataaccaggcttccacattgt

SEQ ID NO: 2645 - DNA, 482 bp, Homo sapiens
agcatctcaggttccctctggctgcactctggaggaccacactcgttttctttttggctgccagaggcccccgcatccaccgctgagctgggagaaagatggcggcagccgtgcgacaggatttggcccagctcatgaattcgagcggctctcataaagatctggctggcaagtatcgtcagatcctggaaaaagccattcagttatctggagcagaacaactagaagctttgaaagcttttgtggaagcaatggtaaatgagaatgtcagtctcgtgatctcgcggcagttgctgactgatttttgcacacatcttcctaacttgcctgatagcacagccaaagaaatctatcacctcaccttggaaaagatccagcctagagtcatttcatttgaggagcaggttgcttccacaagacagcatcttgcatctatatatgagaaagaagaagattggagaaatgcagcccaagtgttggtg

SEQ ID NO: 2646 - DNA, 380 bp, Homo sapiens
acaaaccattccttccctatgtctcaatgcctgacattcagtgcctgacagaatcagcatttggcatgtccttggatatggcatcaatttgatgctttgaactgaaagttctcataatgcatctcaaagtatcttcttaaaaaatataaaaatgtaggccaacttgtgctctcttgtaaggcttgcaaagtggtaattaaataagcagactataactcacaagggaaaaaaagtgcatttttaaataaaagaaaaaaacggagacagttaaaaggacaaccaaaaagataagcagattatttttggttaatcttggggaaaatatgacacgatatttatggtttcttttcttttctggtccattttattttacttaatgt

SEQ ID NO: 2647 - DNA, 500 bp, Homo sapiens
actctgtctgctgagggaatggggtattttgactcccatagaaagcactagcctaagtcaccaaatgactgcttggtccccactgaagcagtgtagctctccatagtatttttggtggttatggattacatgtgtggccagctcatgctttttcttgagcaggggctgtccatgacctgtgctcataccatgctttctaagttctctttggacagggcctcagctgctgcctcagcctgagtttcagagagtgtgtaggagtcctggtaatcttgaagcagtttgaccacctccagatggttgaactgcacagcatcatccaggggaatgttgccccacctgtccttggcaaaaggattcactttgcaagcctcgatcaggaatttaacaacttcgatgtgtccttcagctgcagcaacatgcagagctgtgcgcgagtcatagtctttctgttccatatccatggctgacaaggcaaaccttcgaagagctgagacatc

SEQ ID NO: 2648 - DNA, 379 bp, Homo sapiens
acagtattaatgtcaaccatctctttaaagttagcctataaatattgttgtataattttctttggtcagaaacacttggactgaatagtgacactcggtaaggattttcagtgccatttagcaaaacgtctttagtctatgcaactagcaaaaatctgcataatgcaacaacacagttttcacacttcaaattttacatgaggggttcttcacgattctcctggaacccagtctagcaaaatgagaggaaaggccctagggagatttatttctgttaaatagttaactctgctgagtatgacaaatagtgtctactatctcaaccctccaaaatttgcagagtgttgggactgtcatttgtgatttttttttttttttg

SEQ ID NO: 2649 - DNA, 525 bp, Homo sapiens
accaagaagcaaatattttgtctaatatcacacagatagtagagtagtggaaaggcaatgatgataagtatatgctgttgctagaacacttttccacaactgttacattaacagctttattttctagtgtgaattttcctaaatttaatgagaactaagaggtatttaagactcatacatttattaagttaatatgtgtaaaaaaacatcaacacattgacagaacttctggccataaatattttgatattctataaatagagcatgacatggaaaccttttcttatattaaattacattatgagttttctgatgttgataaagatgtgaatattgtctaaaggcctttctacataccttacactcatagggtttctcaccagtgtgaattctctgatgttcagtaaggtgtgaattaagtctaaaggccttcccacattgtttacactcatagggtttctcaccagtatgaattctttgatgtattctaaggtctacactacgactaaaggccttcccacattc

SEQ ID NO: 2650 - DNA, 399 bp, Homo sapiens
acctgggattacaagcgtgcaccaccaggcctggctaattttttgtatttttagtagagatggggtttcgccgtgttggccaggctggtctggaactcctggcctcaagtgatccatctgcctcggcctcccaaagcactgggattacaggtgtgagccactgtatccagacaaaaataaaatttaatcataacatcattctaataataaaacatcacagccaaacaaaattaatgattccttggtatcattaaatccagttaatcccacatttaataccacttacagcccattattacttttgttatattatcacagccagttccaaaacttatagcccattaagtgtatgagtttacacctgcatttataatctctgatttcttttttttttttgag

SEQ ID NO: 2651 - DNA, 486 bp, Homo sapiens
acccagaccctccaaatccctgtcctgttggaaaaacagatgatggatgtctagaaaacacccctgacactgcagagttcagtcgagagttccagttgcaccagcatctctttgatccggaacatgactatccaggcttgggcaagtggaacaagaaactcctttacgagaagatgaagggaggagagagacgaaagcggaggagtgtcaatccatatctacaaggacagagactggataatgttgttgcaaagaagtctgtcccccatttttcagatgaggataaggatccagagtaaagagaagatgctagacgaaaacccacattacctgttaggcctcagcatggcttatgtgcacgtgtaaatggggtccctgtgaatgacagcatgtttcttacatagataattatggatacaaagcagctgtatgtagatagtgtattgtcttcacaccgatgattctgctttttgctaaattagaata

SEQ ID NO: 2652 - DNA, 356 bp, Homo sapiens
actcagcatttgttccgttttaccgctgagtgatattccacggtatggctgtatcgcaagcagaaccattcatcagttgaaggacacgtgggctgttttcagtttgggactattatgaataaagctgctatgtgaacaggctcttgtgtgaacattttcctttcttggggataaatgcccaacagtgcagttgtggactgtgcgtaagtgcatgtttagtttttgtgacactcccaaactgtattcgagagaggttctaccatcaagttgaactctggaaacctatgaatcctcttttaatttggcaactacttttcttccctattaacagctgcgaagaatgtaacaggcattgt

SEQ ID NO: 2653 - DNA, 467 bp, Homo sapiens
acctgaaagtgatggggagaatggaaccaagttggaaaaccctctgcaggatattatccaggagaacttccccaatctagcaaggcaggccaacattcagattcaggaaatacagagaacaccacaaagatactcctcgagaagagcaactccaagacacataatcgtcagattcaccaaagttgaaatgaaggaaaaaatgttaagggcagccagaaaggtcgggttacccacaaagggaagcccatcagactaacagcggatctctcggcagaaactctacaagccagaagagagtgggggccaatactcaacattcttaaagaaaagaattttcaatccagaatttcatatccagccaaactaagcttcataagtgaaggagaaataaaatcctttacagacaagcaaatgctgagagattttgtcaccaccaggcctgccctaaaagagctcctgaagtaagt

SEQ ID NO: 2654 - DNA, 426 bp, Homo sapiens
acaggaaggtggggaccctcccccagactctactcagattccaatgagcaccagggagggaaaagatggaaaactaaaaggaaaaacaaaaggaaatccagaacaatccgcctagccctgcaggaggatcttgtgccacagccaagggccagggaaggaaggaggatcactcttcatccgacgaagtccaccggccctgcctgcttcaggcttccaggagcttccccaggaagcggaggttgaggatcttgagctgctcatcaaggtccatacggacaatgccatcctcaccatcaatgctcagtaggacgcccgtggcttcccgatcctcgcccaggatcactttcaccttgttgttcttggtgggggtgataggctccaggtgctcactggaaatgctgacaaccttctcactgtccttcaggt

SEQ ID NO: 2655 - DNA, 486 bp, Homo sapiens
gttacgctacacacaacgagtaaaaacccttcctgctcaagatcgtccttccaatggctgtgtgtttaaagattgtgggagcttcgctgaacgttaatgtgtagtaaatgcacctccttgtattcccactttcgtagtcatttcggttctgatcttgtcaaacccagcctgaccgcttctgacgccgggatggcctcgttactagacttttctttttaaggaagtgctgtttttttttgagggttttcaaaacattttgaaaagcatttacttttttgaccacgagccatgagttttcaaaaaaatcgggggttgtgtgggtttttggtttttgttttagtttttggttgcgttgcctttttttttttagtggggttggccccatgaagtgggtgccccactcacttctctgagatcgaacggactgtgaatccgctctttgtcggaagctgagcaagctgtggcttttttccaactccgtgtgac

SEQ ID NO: 2656 - DNA, 465 bp, Homo sapiens
  misc_feature 415, 442, 453: n = A,T,C or G
actgctagtgctgggtgaacagtgagagcagagtccacaaaacacagagaaccagaatgtgaccgcaaggagccaggaccttgtgctttttcatggattacaaatctagggccaaggagagggaaagcagaaagagccctattgggaagaggagctggctgcgcccctaaactgagatggaaagagtaaggctcttgagcccacacctggccaagtagaaatagtgtccaaagttttctcaaaccagagggaaaaaaggtcaaggttaggttcagactgcagacactaagagatgacagatgttgaatacggtgaatgggatgaagctttaaggatcaatgcccaattctgagtgttatacacatttctaggaaaaatattccaatgtagcttttgggggtggggggtggaaatnaggtggtcacatttattcaatcagctngtccctatgangaaggagaggcc

SEQ ID NO: 2657 - DNA, 233 bp, Homo sapiens
actttcttctgtgtgacaattactgcacagtctttccctctgacagctactgatgtaaggccaccctggttaatagccttaaaagcatattctacttggtagagccgaccctcgggtgaaaaaatggtaatgtggcggtcaaaaccggcgctggaaccacgggacatgttggtagaagcactactttaaacacaatccctgggccccgtagcccccgcaccaggcacacaagc

SEQ ID NO: 2658 - DNA, 487 bp, Homo sapiens
  misc_feature 71, 79, 171, 258, 330, 355, 364, 385, 450, 487: n = A,T,C or G
tttgtacaagcttttttttttttttttttttttttttttgggaaagggtcttactcagttgtccaggccanagtatggnggcatgatggcggctcactgcacccttgacctcctggactcaagtgattctcctgcctcagcctcctgagtaactgggactacaggcatgcnccatcatgcctggctaatttttgtatttttcttagggacagggttttgccatgttgcccaagctgatctcaaactcctgagctcaanaaagctgccggtcttagcctcccaaagtgctgggattacaggtgtgagccaccacacccagccagaaatcanatcttaatagaataaaaactattanactgcacanaatgagtaaacattgttttgngaaactctggtttcctttatcaatataggcatatgcatatatttcatatatgtgtgtcagggganacaggcatgattttgaaataaatatgtatcttactgn

SEQ ID NO: 2659 - DNA, 333 bp, Homo sapiens
acgtggatgtcagtgagacagcatgagagccagcagtcatcaaagcgttccacgtttgaagttagcaactgcttaaagttataccccattaaaattgctttctcaaaagtttgggttagtttcaaatgtgatattttggagggacggtaaagtaggtatctttcaggtcgtgataatgagctcctatgaaaggatgcaatataatgacccgcttttctagaaagttcataatcagctctggaacaagcacacttgattcctcactgtgcttcagaatgaggttaagatcagatgttggaacgtgctatgctgtagcgtgtctggaaacaaagt

SEQ ID NO: 2660 - DNA, 325 bp, Homo sapiens
  misc_feature 288, 315: n = A,T,C or G
acttgttaaagttaacctcattcgtggtgctttgcttcagaaggattatttctggggcatgatgaggtgcaaatttctaatgaaagctttcccactttcaaggctttcatggggtttttagtgagtatgaattttctggtgtctaatgtggtgtgacttctggctgaaagctttcccacattcactgcactgataaggcttcttacctgtgtgtattctcaaatgcagagcaagggttgagaactgagagaaagctttcccacattcattacaaccatagggcttctnccctgtatggcttctcacatgcacagngagagatgag

SEQ ID NO: 2661 - DNA, 205 bp, Homo sapiens
ctggccttaagcttcaacacttagaggccagtgtctaatctttgaggtttcgtatacagaaataaatagcaaaggacacagacactgatgacaaaggcgagtaaaacaagggcagcaattcctagtccaatcaaggcaccaatgctgaggctccacatgtagctgtgcttgtaggggaagtagctgcccggctcgctgcagcagt

SEQ ID NO: 2662 - DNA, 481 bp, Homo sapiens
acagagctttgcatgccaggatggagactgtagctagaagatttatcaaactagatgcacaaagaaagcgcctttctccaggctcaaaagagtatcagaatgttcatgaagaagtcttacaagaatatcagaagataaagcagtctagtcccaattaccatgaagaaaaatacagatgtgaatatcttcataacaagctggctcacatcaaaaggctaataggtgaatttgaccaacagcaagcagagtcatggtcctagaactctgcttggaccagaagatgtgaataaacttaagcttatttatttaaaattccaaatgagttgctctagattctaaaaaggtgaaactttggctgttgaaagtttcagtattagtaaacttgagttactttttcttttccattttactttgcttccctgcatttcgaagctgctctttctggtcctccccaccaccccacccccaagacttgtgtttg

SEQ ID NO: 2663 - DNA, 512 bp, Homo sapiens
actcctttgtaacctggaatacttcttccccactcctgatgtttcctgtggctagagggaatactttggtgtaacacccgggctctcttcaccctccctgatgggcgtgtttgggagcaggaactcacgtgtgtagctgtgttccttcccccttttcctcttggacagagctgccctgagggtggtctcctgtgcagttaagtctcacctgagcagctccatgggagggggcttgcccctggcccgcactgcctgtgactgggtgggtaagttgggctgattctggtatttagttagacccgtttcatcttcacactaagccgtgtgctcccacgtggtggagtgattttgactccgaacaccttactctgttgtttgtttgcttttgaatttgttcagaaactgggcagggaaagagtcctttttctaggtcccccagaggccttggcctgtgtgattataaagagggcacgttctgtttttcatcaccctgatgttccgtgacacgctct

SEQ ID NO: 2664 - DNA, 384 bp, Homo sapiens
actagtctggctccacttctaatgatggcttctgcggtcctcgaagaggcactacttctagaaattgttgcttcagagtcactacgagctgacagtgagccaagtcgtgttctacgaggctgagccaataaatcaatccgagagatgttacgccttcctgtgggaggttttgatgtagaacttgttgtggatacttcagaagcaacagatgctttgtcagcatcagcaagttcactgtctgaagcttcaccaagtcgtgctctgcgcaagagggaagtcctggtaggtcgtggccttggaagggtggttgatttactagatgaaccagataccaccggagaagtcttagatttcgttactttacttccttccagtttggaatgt

SEQ ID NO: 2665 - DNA, 430 bp, Homo sapiens
ccgtgacctcgaggtggacaccaccctcaagagcctgagccagcagatcgagaacatccggagcccagagggcagccgcaagaaccccgcccgcacctgccgtgacctcaagatgtgccactctgactggaagagtggagagtacacagactcacattcagaagcaagctctttgacctgagtagtgaaaacagaaagccgtccagtcatggcagctgctccatccctgcatatatcgatacaaaatgaccaattcggttttcctgatatgtatttaaagacttgaatagttctgcagctgtggtgttggttgaaagcaaaagtgcacataatatatcctcatgcacatcctcctgaaaaatgtatcacacaaaaacaagcattgttgccttgctgtcaacactggtagactcattaacctggattgggt

SEQ ID NO: 2666 - DNA, 332 bp, Homo sapiens
  misc_feature 273, 331, 332: n = A,T,C or G
gggaggatcacaaggtcaggagatcgagaccagcctggctaacacggtgaaaccccgtctctactaaaaatacaaaaaaattactcgggaggctgaggcaggagaatggcatgaacctgggaggcggagcttgcagtgagccgagatagtgccactgcactctagcctccgcgacagagcgagactccatctcaaaaaaaagagaaaaagaaaaattaaggctaggtgcagtagcacatgcttgtaatattgacactttgggaagccaaggtnggaggattgtttgaacccaggaatttaaggttacagtgagctatgatcacaccactgnn

SEQ ID NO: 2667 - DNA, 522 bp, Homo sapiens
acaaaactttaaaaatctgactgccccgtcaactgcctcagagggaccaggactcaggccacgcaggggcagccatcagccccccatcgtcagccccgaatggggatggggagacctctttctgagtgtgaacctggctcggcctgaagcctagagctggcttgaagaacacacacagaccagaagacagcacggtgagttacaagtgccacggagaccagggtttctgacacaggatgtggaggatgcttctctgcaacctagtgcaaggcttcccctgccattccgagaattcgcggatctcacaggtggaggtggggcgagcttctttctagtgtggaccagaggtgggggcaatgagtaaacatcttcactgtaagggttttgggactgcccctcagggcttgaggtctcggcatcgtgtctcagtcagtccttggcgatgtcccctcagacgcactcacagacttgcatacgtaatttagtaacatgcatcaactatcctagaacatctacagggtg

SEQ ID NO: 2668 - DNA, 429 bp, Homo sapiens
acctggagggatgcaagacttcaattaccttagcagcaactgttttgagatcaccgtggagcttagctgtgagaagttcccacctgaagagactctgaagacctactgggaggataacaaaaactccctcattagctaccttgagcagatacaccgaggagttaaaggatttgtccgagaccttcaaggtaacccaattgcgaatgccaccatctccgtggaaggaatagaccacgatgttacatccgcaaaggatggtgattactggagattgcttatacctggaaactataaacttacagcctcagctccaggctatctggcaataacaaagaaagtggcagttccttacagccctgctgctggggttgattttgaactggagtcattttctgaaaggaaagaagaggagaaggaagaattgatgga

SEQ ID NO: 2669 - DNA, 243 bp, Homo sapiens
actttcactgccttaaaaatcacctctctacctgccatccctcctttcccctcaactctcagcaaccactggtcctttcactggctcaatagttttgcctctcccaaaatgtcatataattgcaatcatacaaaatagaaagccttttcagattggttttcacttaacaataagcatttagggtttctccgtgtcttttaatgacttgatgtccaattcctttttatcatctacctgaggact

SEQ ID NO: 2670 - DNA, 330 bp, Homo sapiens
  misc_feature 277, 278, 317, 320: n = A,T,C or G
acagtgtgtgagattcaacactggaaaaatacatatgaaacttgttttaattggctccacttaggaccagacacagcacaataaatacagaactgcatcatctttttaaaagatcattgtaattttaacacattcttactaaagaaatacatactatcagtgaccgatctgaaactctgtaacaggtgaagggagacttacgatgaatatctgagcataggttcgctagcatcttcacactcatacataaacattcttaaagggaataagaatgatnncaaattcaaaacaacaacaacaacaaaaaaacaaatggnggncaaactttct

SEQ ID NO: 2671 - DNA, 336 bp, Homo sapiens
caaagctgctagttcagatgttgacagtgttttcatgaatgttggaatcttactagtccagacttacttaggatgttgttggggaaggcacttgggattttctgtgtcttgcattcacagagggaggccatttcagattcaagagcattggattagggaatcgtgaggcagggatgctactgcgtatttctctctgcaggttggggattaaagttcctttccccatgggtttgaagcagactcagactgtctcaggatcaaagcaaccctcaatggttttgatttatgtcattgcttaccactccccaaccaatcccaggacagctgggtcactgt

SEQ ID NO: 2672 - DNA, 405 bp, Homo sapiens
actgggattacagatgtgactcaccatacctggcttagcctagtttttaaaaagcatcctccattcattccagcacacattcccagtgcccagttgtgtgtgctgggtgatgttggtgacacagtgatgattgagaccacctctgctctgccctctgtccacagtagggcacacaatcctgtagggtttgggggggcagacccctctcacacaattatgatccagagtgatcagggctgggatggaggagcccaggagtctgggagagcccaaggagacacacctcattcaacctgacggctagggagggcttcctgggggagggggcatctgagctgagacctggagtaagagtagaaatgaggcagatgatggggtgaggcagcatgaggtgcaccaggcagc

SEQ ID NO: 2673 - DNA, 365 bp, Homo sapiens
cgacgccaggggtttgggtgctggagaatctggtaaaagcaccattgtgaagcagatgaggatcctgcatgttaatgggtttaatggagaaatataatatccctagatgatggctacagtttctcatcttcccggctatgtcctatcacaatttgcatgctggaattgctcggtcttaggaacttctaataagaatactattctgttatctgaggggggaggggggatggggcccctgctacctgaccttaaacgatgattgaaaaaacgaaaaatggactgaaatccttaattggcagaaatgtagtatgacaactatccaaaaaggcatctctataagaaatgactaattgacaatctgctgt

SEQ ID NO: 2674 - DNA, 421 bp, Homo sapiens
acttttagccataaaaataatgttggtgtcatttattgcatatacttcaaattcagttttgtcaacaaaatggacaccttctagtgaatttgagaagatgtgggttgggaatgtaacccatattatatgatttttcatggttgtttcatgtagacatccttcagagcatggcctcagctaccatgtggcatcatgtgcatgcttcatacaggatgatgaggacttaggacctatgctttggtatcaagcacctttgaaacattccccgtccagtaggcagtggacttgagtttcaatctcagcattgatattaaccagctatgtaattttttggcaaatcccttacctactacttgctttatcttcctctaagtcagaatagttgacccttaaacaccttccagcactaagcatatctttc

SEQ ID NO: 2675 - DNA, 452 bp, Homo sapiens
  misc_feature 442, 443: n = A,T,C or G
acacccagctcatttaaaaaaaaatttttttcttttttgagagtcttgctttgttgcccaggctggagtgcagtggtgtgatctcggctcactgcaagctccacctcccggcttcacgccattctcctgcctcagcctcccgagtagctgggactacaggtgcccgccaccacacccggctaattttttgtatttttagtagagacggggtttcaccgtgttagccaggatggtcttgatctcctgacctcatgatccgcctgctttggcctcccaaagtgctgggattacaggcgtgagtcaccgcgcccggctcattttaaaatttttgtagatcagtgtacagcaagcaagcctgggcaaaataggtcttactgatatgactgaaatctgtattgtggattactgaaaattggctatatgtttggcttactagatcagnnttaaatatc

SEQ ID NO: 2676 - DNA, 499 bp, Homo sapiens
acttatactcctgacctcagccccacacactctggttttataaagctataggacagagcagagatggaactgaaaaacagggtagaaaataacataaattggaggggaacagtgggatgcagaaagaatgacaacagccacatgtgccccagtcaaatacttttagtccctgcagcagaagatgccaaccaagtctctatactggctggggatcctgccatggatgcaggagaaaaaattcaatcacaagggagtaagtgacaacaaaaagaaaaaactctgagccacagctacactgggaggggggaggaccagattttgctacttctgtcacacaagctagaaaaaccctacctctcccattgggcaggcaacctgacattccacccagttccttgccttaccatactatgtattcctcctcttggagaattaagacctgggctaaatgctccactccaggataaggctgagcagtcctagttctctagactgcctc

SEQ ID NO: 2677 - DNA, 473 bp, Homo sapiens
acactcaaaattggtgtgtcaacacccctaaaatgatactagtttggtgaggttgtgaataacctctccctggttatgcactctcatgggatgtgcgtttgatgtgggagggagagtcctcctcacctcggaggttcctgaggaggactttcagcttctgcggctcattggtgcgtctcctgttgaagtcagctcgtgggtgtgtttgggcacagtggtctgtctgcaggatgtggaagaggctggccatgttaggcccaattttctccatcaggctgtctctgattgtgctgactgtgtcttcatcacattccagcaggcttcggacaagtctgttatagtatctgttggagaagtgattgggcagctggacgacctcagtgatggcttcagggttccgcttggcgatgctgcacacattcagcttgctgtagcactcttcctgcacctcagcaatcatcctttggaaagtg

SEQ ID NO: 2678 - DNA, 225 bp, Homo sapiens
acggcggattaactgagtcaataaagaccactatatagataagataataccagggtatatttgcttagcctgtgcagacaacggagggagggaatttgctcattaacatgttgggattggttggggggcctattcacagaatatccaggggatgacaggaactcccatggtggctgccagtccagagagacacgacggtggcttacaggctaacccagtggaagt

SEQ ID NO: 2679 - DNA, 541 bp, Homo sapiens
acccgaggcgaagagagctcgctgagtcctgattttttgagtgtctttgttccgggagagtttgtgagttgaaagtatctctgctgggctttctgggccgaaaaccgttccgggggagccgccatttgctttcctgttccctagctagctagctagctctctccgcgttgtccggcagcggcacctagaggttgggacttggcattgcatctgatttaatgaacttaagtctgtgaataagcctttgtgttaacgactggtattcggtcacagcatatttagagaaaagacttggagcttaaataaaaactaaggcaaaatagacgcttagctgctgatctacagagaacttcttgtaattaaaagatttcaattcatagcaaactggtgttttaaactattgcagtagctggaactttttagtgtaaccagcatttattggagaagtgaatcacaaggaaataaagatgagtaaaagcaaagatgatgctcctcacgaactggagagccagtttatcttacgtctgcctccagaatatgc

SEQ ID NO: 2680 - DNA, 481 bp, Homo sapiens
  misc_feature 452: n = A,T,C or G
acgtaaataaattaattaaaacacatagatctgctttgtgtttttatttttattttttgaaaaacaaaaggcaagtctccaacaattaacttttgatgctttctgttcccctaaaaccaaaaaatgaaccccttgtgtcgttgttaacccatcctttcatttactcatataattagccaaaaaaaaaaggatggctacataccaatggattgattctcttaattgccacggcaagggggcgatcctatcatgacttaacatcaagcgcgcagttcaaaactactgtcttctgtcaaagttttctcctcttaaatgttattttgcttttacgtctcaactgtgtatgtaaaaaaaaacgaatatttaaattacaaccctagactaaaaatgtgtttataataagatgtggatatttccttcagtagattgtaaccataatttaaattattttnttccacactgttttttatatctgtcatgt

SEQ ID NO: 2681 - DNA, 354 bp, Homo sapiens
  misc_feature 311, 320, 348: n = A,T,C or G
acctggtgttcggttatggagcctctctcctctgcaacctgataggatttggctacccagcctacatctcaattaaagctatagagagtcccaacaaagaagatgatacccagtggctgacctactgggtagtgtatggtgtgttcagcattgctgaattcttctctgatatcttcctgtcatggttccccttctactacatgctgaagtgtggcttcctgttgtggtgcatggccccgagcccttctaatggggctgaactgctctacaagcgcatcatccgtcctttcttcctgaagcacgagtcccanatggacagngtggtcaaggaccttaaagacaaggccnaagaga

SEQ ID NO: 2682 - DNA, 250 bp, Homo sapiens
acagaagagaagcatgtccttccaaggaatcagacaacctgtgaccgtcactgagctagtagattctggtatattgagaccgtccactgtcaatgaactggaatctggtcagatttcttatgacgaggttggtgagagaattaaggacttcctccagggttcaagctgcatagcaggcatatacaatgagaccacaaaacagaagcttggcatttatgaggccatgaaaattggcttagtccgacttggt

SEQ ID NO: 2683 - DNA, 53 bp, Homo sapiens
  misc_feature 24, 42: n = A,T,C or G
acaaaagacccccaccaccaccgnattctgccatcactttgntccaaaaagta

SEQ ID NO: 2684 - DNA, 380 bp, Homo sapiens; identical to SEQ ID NO: 749

SEQ ID NO: 2685 - DNA, 312 bp, Homo sapiens
acactctatgatgttcacacaatgacagaatcacctaatgatgcatttctcaggacataaccctatcttgaagcaacacatgactacacatgatttgaaaatatttgtaacatattgtcagaagggcagaatacagttcacaactaattgatcatgacctttcaatgtatcatgactcagattaagactcatgaactctagcctatgcttgatctcaaataaccacaaacttcctacaattgtaggattttttcaacctcttcctcatgggaagctgcactctcactggtcctaagtcagacagcttcaagt

SEQ ID NO: 2686 - DNA, 273 bp, Homo sapiens; identical to SEQ ID NO: 745

SEQ ID NO: 2687 - DNA, 379 bp, Homo sapiens
ggcggcggcgcgatgaccacgctacgggcctttacctgcgacgacctgttccgcttcaacaacattaacttggatccacttacagaaacttatgggattcctttctacctacaatacctcgcccactggccagagtatttcattgttgcagaggcacctggtggagaattaatgggttatattatgggtaaagcagaaggctcagtagctagggaagaatggcacgggcacgtcacagctctgtctgttgccccagaatttcgacgccttggtttggctgctaaacttatggagttactagaggagatttcagaaagaaagggtggattttttgtggatctctttgtaagagtatctaaccaagttgcagttaacatgt

SEQ ID NO: 2688 - DNA, 408 bp, Homo sapiens
  misc_feature 343: n = A,T,C or G
acggtgctcacacctgtaatcccagcactttgggaggctgaagtgggcagattacttgaggtcaggagtttgagaccagcctggccaacgtagtgaaaccccgtctctacaaaaatacaaaaattagccaggcgtggtggtgcacgtctgtaatcccagctgctcgggaggctgaggcaggagaatcacttgaaccagggaggtggaggttgcagtgagccaagattgcaccactgcactccagcctgggcgacagagtgagactccatcttggggggaaaaaagtatatatatatacacacacacagacacacacacacacacatatctctaaatgtgtgtntagaaccttttatcagtataacattgatttataattaaatgtgggtgaggaagaatgtgtggagt

SEQ ID NO: 2689 - DNA, 397 bp, Homo sapiens
  misc_feature 273: n = A,T,C or G
acccctgatcctcactaaagtccttaggaatgttgtctccagtcaactctgccacgatgttggggatgttgccaaaaggacccaaatgctgaagtccttcatgagctccaccttcaatgctctgggggcccacaagattcatggcctggtgagctggatattccactcggggcctggcaatgcccaattgctccataacaccatgaagcagcctctggatatctgcttctgagacccggtcaggggtccgggggctgtaagcaaatgctggantccatccagatgccagccaaaacagtaggccagatagcatggtagagaccatcctggagaccattgtcaaccgaggggcagcccgaggagcctactgcggtatgggccttggtgggggtcaggc

SEQ ID NO: 2690 - DNA, 504 bp, Homo sapiens
accttttcttcccatcaaaaatgcattaacaagatcatgcttatagttagtcagcacaagaaaaaaacgacaatttatactgaactatttaagtcttgcagtagagtgctcacaactccgagctgtatctgttaaccttttcaatagcattcattatgtgacattgtcaccaattacagtaaaagaacttcactaatttttgaaagctagaattactcaaaaaattctgcattgtaaataataccaggaatattgcatttaagcctaggatggcaaaattacttaaatcttttctatacttttttgtgtaatataggtaggaaaatgaatactatataagagaatgaaatatatcaagttcttatatttttacctaagaggctatttattttaaggaaagttgattaatatttaaatgattaaaaaataaatcaatgttaagtattaactgcacaaaatctaaaaaaagaccacattacatcatactacattatatagatagat

SEQ ID NO: 2691 - DNA, 203 bp, Homo sapiens
  misc_feature 158: n = A,T,C or G
actgtagtttacagctagtccttgaaatgtcttttttaggatctgttaggaataagattgatattgcattgtgtgtaacctgcacaatgtggaaagctgatatacctgtgcaaaatctttgcctctgtgctgtcagtgtgatgtgctttctgcatggntatatactactcatgattctatcaaaacttctaaacctcaaatta

SEQ ID NO: 2692 - DNA, 513 bp, Homo sapiens
acctacaaacttaaacagaattccagactgcaccatatagatgtggccctcttattttgtgcacctgcaagttcactgtattacttcacgatttgatcggactaattctccttttttccactaagacaaatacctcactgtccaaactaaattgacccttcataaatgtatgtaaactttctgtgtttcaatatcctagcatgataaatttagctagttctctctaggcttgcctatcaatgggagctcttagatcttcttccttcttgatttaattaacaatgtaaatttgggctaaaagtcaattaattaattttgccagtttgaaaaactcgactactgatttgcttactaattcatctatttcctttatgttttttattttgctccctttctaacttctttagatatcaaattccattgatttttttcctttcttatgaataaagccatttttgttggaaaatgccaaaaaaatttaaaggatccaattaacataaatttgattaacaa

SEQ ID NO: 2693 - DNA, 260 bp, Homo sapiens
acattaccaaaagtttttcatatacctacagagctaactaattacaactgatttaatccactcaagtttagaccagttaaacccataggatcctgtatggttatcaatgtgatgccttgcttttcataaaataggtataattgggtcatacacttgacgagagggtgactgtttctaggggaagaaaaccctttagattgcaggtaactttcacttttttttttaatatacactttacatttgtataaattatgcagggt

SEQ ID NO: 2694 - DNA, 576 bp, Homo sapiens
acatagaaaacctccgacaacaagctcataaggaagaaagcagcccagattataatccctaccaaggtgtctctgtcccccttcagcaaaaagaaaatggcgatgaaagccacttgcccgagagggattcactgagtgaagaagactggatgagaataatactcgaagctttgagacaggctgaaaatgagcctcagtctgcaccaaaagaaaataagccctatgccttgaattcagaaaagaactttccaatggacatgagtgatgattatgagacacagcagtggccagaaagaaagcttaagcacatgcaattccctcctatgtatgaagagaattccagggataacccctttaaacgcacaaatgaaatagtggaggaacaatatactcctcaaagccttgctacattggaatctgtcttccaagagctggggaaactgacaggaccaaacaaccagaaacgtgagaggatggatgaggagcaaaaactttatacggatgatgaagatgatatctacaaggctaataacattgcctatgaagatgtggtcgggggagaagactggaacccag

SEQ ID NO: 2695 - DNA, 423 bp, Homo sapiens
tatctgtaaaatcagatgttttttctttgtagagaaggatttctggtgcttttgcttactaagagaccgatattcttaagttgttttcttgttttaacagccttgagaaatgtttggttttggccagcagaattcttgtctacttttttctttcccaaaaagtgttttttaatttctctaccaaagaaaaaatgagcaggtttaggtttttacatgacttatatacattagataaaaggagctgtataatttagcaggaaaggactatgggagaatactttactgtgagtggaaaatgttagcacatttgactggtttgccctggaatccactgcacctttacactgcaccatgaaacctacactccctggtatcatagcgcgtcatcacctcaacaagtcagtcgtctccattgatatttgt

SEQ ID NO: 2696 - DNA, 516 bp, Homo sapiens
tgccatactagtctttgccgcctgcgaagcagcggtgggcctagccctactagtctcaatctccaacacatatggcctagactacgtacatcttgcctagatgtcgatgactgcaagtaataatacagtttataatgaaactatctacaattcttgttttagcacatctgttatccgtaaaacacctgtaactagcttttttaatttattatttgaattttaggatagcgaatcactaatttttagttgctgaggttggcattttagtgattattaagcacttctgtcagtctttgaaaaaagaacgtattttttgtgctttgaagatctctgaagaatttcttttataatagaatgggcatgtattgtaacagttttatgtcaaatgatctgtgctgtagaaaaacattaacccttgttcaaaaaagaaatggataaacttggcctttctaagtggtaagaatgacctgtcactataatatactgtatgtttacattttatttaaatttaatctc

SEQ ID NO: 2697 - DNA, 407 bp, Homo sapiens
acccctgatcctcactaaagtccttaggaatgttgtctccagtcaactctgccacgatgttggggatgttgccaaaaggacccaaatgctgaagtccttcatgagctccaccttcaatgctctgggggcccacaagattcatggcctggtgagctggatattccactcggggcctggcaatgcccaattgctccataacaccatgaagcagcctctggatatctgcttctgagacccggtcaggggtccgggggctgtaagcaaatgctggagtccatccagatgccagccaaaacagtaggccagatagcatggtagagaccatcctggagaccattgtcaaccgaggggcagcccgaggagcctactgcggtatgggccttggtgggggtcaggccaggaacggg

SEQ ID NO: 2698 - DNA, 482 bp, Homo sapiens
acaagatctagagtttttccttagactctttagtcttttctgaattaaagaataagtgctcttaaatccatattttatcctgtcaaagtctgaaatgtgttcattgatgatttggtgacatctaaaaaattgtatttagttggcttggctcacccctcttaaaaatacttagccatctcttggtgggatgtggtgggggtattaaggtctcagagttatttattttctcacctaatttcaaacctttataaacttggggttttgttgttgatggtggtagtattttttgttaagttgtttaaaaggctgacttgattggagcctcctctactttttcttgagggttgcaagtattgtatggtgggggaggggggccttaaggcaaactgtctaaaaagtgactatccaattaatttaactagtaaattagtaagaattattcttagtattcattcagagtttaagatgtgaaaaatctgcac

SEQ ID NO: 2699 - DNA, 529 bp, Homo sapiens
acatacctcaaacataaacttaaggttctgtttaacaacaaccaaaaaaaaaaaaaaaaaataggatggaaatgtgtcactaaataacaaagtaaatgtctttaaacatgaagaccttaaattcatatccaagcaaaaagacgaagaataagttaacccaacttgtttacaaaaataattatttatcaagcaagcttttatagtagagctgcctcaatgaactgcctcagacttaatctcaatggtgtagcttgaaatagatttcctttattagcagggataagaagtatctgaatgaatgtgtcattaaattaaggaatactttcccaaaaacaataaaaagtttaaaaataaaaactgtcatttatttataaaatatcaaataaggcctctgactgaaaaaaagaaatctatataatgtttgggccattagcccttttctattcaatcagtctcatccaccccattcaccccaaacttaagataaaaaaaattctcaagtgtagttttgaattttaccaatatatga

SEQ ID NO: 2700 - DNA, 356 bp, Homo sapiens
  misc_feature 38, 139, 253, 267, 312, 314, 318, 349: n = A,T,C or G
acaagctttttttttttttttttttttttttgcggggnggttggtataattaaacgctaccaccttgactccaactccccttttgaaatggaagctgaagcaactcaaggttaaattttcaatcgaatccaagtttaanaaagggaacaggactgtgccaaccagctagtaattacaaactagtgccttcaggtgcttgaaatctagtgcggttaatgctctcataccagtgaaaacagactggtcaacttantttttttgttttgntttttctttttctttttttttttttttacacgttttgttacaccnanaacnatgggtaggccccatctggggtcttgggganaaaagca

SEQ ID NO: 2701 - DNA, 259 bp, Homo sapiens
aagctcgcccggagaacggggaggaatatgctgtggagctcctctgccatataaacaaaaagaggaaatctttcaaacatggctgaagcaaagacccactggcttggagcagccctgtctcttatccctttaattttcctcatctctggggctgaagcagcttcatttcagagaaaccagctgcttcagaaagaaccagacctcaggttggaaaatgtccaaaagtttcccagtcctgaaatgatcagggctttggagt

SEQ ID NO: 2702 - DNA, 97 bp, Homo sapiens; identical to SEQ ID NO: 1586

SEQ ID NO: 2703 - DNA, 268 bp, Homo sapiens
cggcccgagaagctcgcccggagaacggggaggaatatgctgtggagctcctctgccatataaacaaaaagaggaaatctttcaaacatggctgaagcaaagacccactggcttggagcagccctgtctcttatccctttaattttcctcatctctggggctgaagcagcttcatttcagagaaaccagctgcttcagaaagaaccagacctcaggttggaaaatgtccaaaagtttcccagtcctgaaatgatcagggctttggagt

SEQ ID NO: 2704 - DNA, 343 bp, Homo sapiens
tgcaagagcaatagctatgggcaccaaatggtcaatcttcttatcataatgttgagtggaagaagccaggtccaccagacacatgctgctcatttatccaaagtttggacacaggcaaaacaaaactagtttgatcgtgatgggaaacattagagaaatgcaaagacatgaccatcataattgtcaggagaaggcattggttaggattgggaagcggcaagcagaagcatttagggattggctggcaatgttttacttctcagctgagtgagggttgcatcggtgtttatttgataacacgttctaggggctgggcaagatggctcatgtttgtagtctcagt

SEQ ID NO: 2705 - DNA, 266 bp, Homo sapiens
actccttgtcacagaaaacagaaaaacagttgttcctgttgtgtggtttatagatttcgaagcaacatgtcacaacaataacctccatagcacctccccttcccaaaccaaacaacccaacaaaaaaaatccctcacttttgttttctgtttattgcttacctggctttttatattgcattttgcaaaagaagaggtctccctcaatcctcccctttagggaaggagtcaacagtgtaactaaatttctctaggaagatggaaagt

SEQ ID NO: 2706 - DNA, 484 bp, Homo sapiens
acatgatcagcaaacacagccatgaacagagtgaccggggagaaggggtggaggtcgtccagaatgagccctttgaggaccctcaccatggcaatgggcagttcaccgagaagcgggtgtatctcaacagcaaactgcctagttgggctagagctgttgtccccaaaatattttatgtgacagagaaggcttggaactattatccctacacaattacagaatacacatgttcctttctgccgaaattctccattcatatagaaaccaagtatgaggacaacaaaggaagcaatgacaccattttcgacaatgaagccaaagacgtggagagagaagtttgctttattgatattgcctgcgatgaaattccagagcgctactacaaagaatctgaggatcctaagcacttcaagtcagagaagacaggacggggacagttgagggaaggctggagagatagtcatcagcctatcatgtgctccta

SEQ ID NO: 2707 - DNA, 273 bp, Homo sapiens
acaggcagatgaaaccaggtcactggggagtctgcttcatttcctctgagctgttatcttgtgtatggatatgtgtaaatgttatgactccttgataaaaaatttattatgtccattattcaagaaaggtatctatgactgtgtttaatagtatatctaatggctgtggcattgttgatgctcacatatgataaaaaagtgtcctataattctattgaaagtttttaatatttattgaattattttgttactgtctgtagtgttttgtggagt

SEQ ID NO: 2708 - DNA, 492 bp, Homo sapiens
accaaacatagcccttaggcctgggctaggctctcaaaggtctttcccagaaatggaggcagcagtagcttcaaacaggcacaaaaacagccaggaggaggcagcatccactccatgaaggcctaagacaatgaaaggaagccagagcaacagaccaccttgggatccggggagaagggtaaatgggcaaaagggttgtatttcctgatgctctcagaacatcagaccacaccatgtgaatttaagcaggactattttaagtggggaaacaatactagaagcatttggtgtattttcctggcactcacctcctaggtaagcaggagagcgggacactcaggagttgtgactaaactcacacttaagctgcctgtccagaccgtccccttggctgaacacaacactgaaattgtggcagtgtctgttgccccagtggacctcccacttactaatgagtatgtaaaacagaggagccacagtgaggcctttcac

SEQ ID NO: 2709 - DNA, 323 bp, Homo sapiens
  misc_feature 1, 47, 48, 85: n = A,T,C or G
ncactggatgcagccatgcatggatggtttttccttatttttcagtnntttcctctgaagcagctgcactgatacatttgggagntggtggcttgactttgtccataaggggcgtggccacttcacatgatggcgggcctttaagagcacaaagaagtttaatatggacaacaacaggaaaaagcaagaagaaaacaagtagggaaaaacagctaacctggagagaaagaatttctttaacctttatgttcttcattaaaaatcttatcttggactgatttgagggatttttagaaacatggccttattttatataagcatta

SEQ ID NO: 2710 - DNA, 495 bp, Homo sapiens
actttcagaacactttatacataataatggtaatcaagggcactgctttaaatgaagatactacagacctttaggaatcatatgccttggaaaacaatctatgtatggtgacttgtcaacaaagtatcttccctagttggatgccaacttgtaaccaagaagactttcttctattcaagagaaatttggttttagttttgatttaatacttggtccctctaattaatcactggggtgattaacatgaattctgttggtataaagagtattggttccctaattagcctgcattgttgaagaccacatagatgtattactgataagactatgaggctcatgtttaattactcaatcaaaattaggaagaaatgctttggaagaaactaaaaaattacaatttaggttaatttttaaaggcaatttagtatacatgatgagctagctttgaaatacagatttaaatgtttaaaaattaatttgagggcaagatttggt

SEQ ID NO: 2711 - DNA, 489 bp, Homo sapiens
accatattccttctgcctcaaggaattcttttaatatgttttttctcttaaaatttcttgctatgtaggtctattggcaatacattttctcactttttgtctaacaaagtctttatttctccttcatttttgaaagatattttccctctgtataaaattctgtgttgactcttttctttccagcctttcaaaaagatcacttcaggggggccaggtgtggtagctcatgcctgtaaccccagcactttgggaggccgaggcaggtggatcacttcagctcaggagttagagaccagcctggccaacatggtgaaaccttgtctctactaaaaatacaaaaattagtcaggcgtggtggcacatgcctgtaataccagctacttgggaggctgaggcaggagaatcacttgaacctgggaggcagaggttacagtgaggccagatcgtgccattgcactccagcctgggaggcagagtgagactccatct

SEQ ID NO: 2712 - DNA, 389 bp, Homo sapiens
actttttttaattgtcacatttctttgttacatctttgtgtccaacaaaacctgtggaaatctgcgttcatttttgtggtgagggatgggggtgaaaaaggggagacttgctctaattatgcatatacatttgactatgtaaaggtagttgtagactatatgtataaataacaagttaacacttaatattctaaattgttctaaggaacagtggcctgaagccatgactagttttgtggagctgctggctcttttaacagtagctgacctattggatttaaactgagactgaaattgacatttgtggttaggttatctagctgaggctttaacaatggagcagataatgtctgttcctgtagtggatccatttaatttcctatttgagt

SEQ ID NO: 2713 - DNA, 499 bp, Homo sapiens
acatggcctggcctttgaaatacaaggagaaagttgggtgcagaagaaataggagaaaactacaataatttctgcctcattgagtctgtgaagtagacccacttatggcacatacgttcctgtcttagaggcctggaactagcagatctcgtggaaagagttctttcccatggaaatgacaacacaggcaggtcatttgagtggaggcttaaaattcctcaggatactggatcagggtaaaagctgctccttagattccagatgagaatgtgtatggtgtgttcagcatagggaacacagcttttctggggaaatgacagtgcttccattgtgagccttgaagctcactgaacccaagacggatggcaggtggaagctctgctaaggagaggcccttcttacgcctctttctggggaacctgagcatgttagtgccttttaggtaatgttacttgtgcagcctaactgaaggatgaagtcctccagcttaccaccctag

SEQ ID NO: 2714 - DNA, 501 bp, Homo sapiens
acaacatattgtcaccacaatccggagggccgccaaaatcgcagacggctatttgcatcctttcagtgtgacttttcaagtgggcttggagactcatgagaaaatgcagtatctttctcaccttccaagtccccctccaagtgcttatcaagctaggacaattcagctgatgtagactttcatacgatttttaaatgctaaaactctagaacaattaaatggctggtttcctgcacaaataaatgcagacttgtctcttttgcagcagtggttaaagcacattcctagagatgtttttcattacacttcactataacattggaattccgtaaccacattattactcaagaaatatatattatacctcctagggaatctaatttgaaatatgaaaagtttaacatcagctgtcattatgtctctctttctgctcattaacaacaacaaaaaaaaacccaaaatttaaaaacaaagccccagccactgctttagcttttgtgt

SEQ ID NO: 2715 - DNA, 413 bp, Homo sapiens
acttttttcccctttaatccaatatagttgataattaaagtgtattttgaatgacacagatattgtgatttactgcaaggatcctaacacacacttaaaatcaagagccaaggagtagtgagttgtagataaaaaaagaatgtcagctttggagacagtctgggtttaaatcccagttctgtcaatttgagctgtttactgtctctgagcctacatcttcttgtctgtaaaatggagataaaatgggtttaatgaggtctaccttgcagagccattgtgagcattggaaatgatgaatgaatcataccagaacgtctagtataattacagtcatgcattgcttaacgatggggatacattcttagaaatgtgtcactaggcaattctgtcattgtgtaaacattatagaatgt

SEQ ID NO: 2716 - DNA, 219 bp, Homo sapiens
ggcctgctttctttttagtgaaaaggatctgtgggagcttttattcccatggctgccttcctcaagtcaacctctttccccggaaatggcatcatctctggactgttgtttctccttcttccttctcctccttctcctcctcctcctcctccaccatgcccggctgatttttgtatttttagtagagacagggtttcactatatgggccaggcagatct

SEQ ID NO: 2717 - DNA, 435 bp, Homo sapiens
acttaaattaacctaaaagagctctttcaaaaatattaattggtatactgatacattccacctcatcatgactggaatggcttaaagagtgtaagttcccaagtgcctatccaggatagagtgagcaagtcagaacttaatttagtaaggttggccatacaaaaaactatgctttaatgctttaagatgttctcccaaccccaagtctgcaaaactcaaacagtcctaatgcagactactgccttaagtttttttccctttttatatttatggatgaattgatgactcctgttaaagttgtatcatacctctgtgccaaggtttgattttaggccaagtttagtaaatttattttgtcaaaacaattggtatcgtgagcattactgagccaacaggacatcaaagtagtaagttgtctaaagttaaagtcacagt

SEQ ID NO: 2718 - DNA, 301 bp, Homo sapiens
ttttttttttttttttggtgtttgtagcgccactttactgccaatagctgacattgccctgggttaggggagaataaataaaatctgtggcatcagacaggtattaccgaggcgaagagtggactgggctttcgtgggcacttaccctgggaagggggtatgaggtggctggagaagtgttcatggagagtgtctctctcctgcccccaaggccacggaatcttctattccttctttgtacccaaagggcaaagtggaggccagggtctctttgctaaggagctaagtaggggaaagaggc

SEQ ID NO: 2719 - DNA, 351 bp, Homo sapiens
acatcaatgataatgctaattttattatagtaatgtgacttggattcaattttaaggcatatttaacaaaatttgaatagccctatttatccttgttaagtatcagctacaattgtaaactagttactaaacatgtatgtaaatagctaagatataatttaaacgtgatttttaaattaaataaaatttttatgtaattatatatactatatttttctcaatgtttagcagatttaagatatgtaacaacaattatttgaagatttaattacttcttagtatgtgcatttaattagaaaaagagaataaaaaatgtaagtgtaaaaaaaaaaaaaaaaaaaaaaagcttgt

SEQ ID NO: 2720 - DNA, 430 bp, Homo sapiens
acacacctttgtccactgggtaaattatattcattatgcccactgctgcagcacgcataaaccaacacccctgcatggctgaacagggcctaatctaggactgatgggagaagggcttgcaaaccaagatcaaggtgtttctccgctaatactgtctaccaagctgatccctacaaaaatgcatataaaagcaggcaagtttagctactgtgttgcaagagaaaccaggaccttgttaaatagttctctccattaccatttattctctcaagggaagcttaaaaaaacaacaacaacaaaacaacacattggtctggccacctcatgaatccaacaagcattagtgtggcatttcagtggagaaggaaacttggggggaaaaatcccatcaaggttgtaagaaaggctcccaatttaactgtccctgtcc

SEQ ID NO: 2721 - DNA, 513 bp, Homo sapiens
  misc_feature 481: n = A,T,C or G
acagatggggtcttgctatgttgcccaagctggtcttaaactcctggcctcaagcaatccttctgccttggccccccaaagtgctgggattgtgggcatgagctgctgtgcccagcctccatgttttaatatcaactctcactcctgaattcagttgctttgcccaagataggagttctctgatgcagaaattattgggctcttttagggtaagaagttcatgtctttgtctggccacatcttgactaggtattgcctactctgaagacctttaatggcttccctctttcatctcctgagtatgtaacttgcaatgggcagctatccagtgacttgttctgagtaagtgtgttcattaatgtttatttagctctgaagcaagagtgatatactccaggacttagaatagtgcctaaagtgctgcagccaaagacagagcggaactatgaaaagtgggcttggagatggcaggagagcttgncattgagcctggcaatttaacaaactgatgct

SEQ ID NO: 2722 - DNA, 580 bp, Homo sapiens
  misc_feature 510, 511, 512: n = A,T,C or G
acttttctttttatatttctatgcttaaaattctctttcctagtcaaaaattgcccaaatctgtgtttgctttctgcttgctacatttgtctcccttacttttcttgagctaaagacaggctttttccaccggcatcatcactgctatcatcattaacagcgtaattatacaagcatatttaatgctgagtttaatttaatatgtaatacatatggtaattgtagggtaatacccacaacaactgtagtttcttacttggccaagagaatgcttatttaagtgttagacttccattctggcaaaatcttgccttatcagaagacattggaaagagggattccctttggtgtttggtcttctacttagaaaaacctattgcagttagtttatcttgtagtattcatctttgtattctgaagataaggtttgaattaaattgatacacacagaggggaaccgattttttttatccaatgtgaattataaatgagataatccacagttattcnnngtggagttgttgagactatgaaagactcattgtctttgtattcagctcttaaatagtgtaactatatc

SEQ ID NO: 2723 - DNA, 283 bp, Homo sapiens
acaaactttataaagaatgttagtatgtcataaaatataacattacagcttatttaaaaccaaatatagttgaacatatttaaaatacattttcacagaatggatgaattagttgtttcttcagagttacttatgaacagttgaatgctttaaaatgttctgtctgtaggtaacatctaaaacacaagtgggtttatttaaatttttaaaatttgaaattttttatttgcaaaaaattgttttatgctttattatatcgcaaatgagtgtcagatttttgagt

SEQ ID NO: 2724 - DNA, 568 bp, Homo sapiens
  misc_feature 543, 564: n = A,T,C or G
actggatgtggttgcccccatttgtgtgtgtggttgtgtgtgtgtggttgtgtgttggtggccacagctgagcctctgtcaccagagaaggctgaggccccaatggcacacctcagaaacctacaccccgaggctgggcggctggactcctgagcacaagctccctctcgcaccctttgccagacagtttgtctccaatttcaaactgacctaaggctcttactcctggattttttgtttttaaaccttctcccagccagtcttcgggagggcatgattagagaagtgctcctttgctgatggaggaggggacctaaggaagaaggtggatcccaggtgcctcctctctaattgatcctccccacccagtttcctttgcctctcttccttctaccaggtcatgttttttactctctgccccttctgcctcctagcatttcaaaaactgtagagtgcaccccatagtggacatttttagtccaggccttctaattagcatcaaaaagttcctggattcccaggcacgcctcctgaaaaactganagatatgtctctttccagtcntctt

SEQ ID NO: 2725 - DNA, 157 bp, Homo sapiens
acatgcattcttagactaactctcagatgctttgctcttttggagctgaagaattgtttgatggtgatgtcatatatctgatagattagtttcggtggttctcatttcacttttatacgtaatttcttaactatattaagatagttgcaggcagtgt

SEQ ID NO: 2726 - DNA, 486 bp, Homo sapiens
gagagagcgagctgagtggttgtgtggtcgcgtctcggaaaccggtagcgcttgcagcatggctgaccaactgactgaagagcagattgcagaattcaaagaagctttttcactatttgacaaagatggtgatggaactataacaacaaaggaattgggaactgtaatgagatctcttgggcagaatcccacagaagcagagttacaggacatgattaatgaagtagatgctgatggtaatggcacaattgacttccctgaatttctgacaatgatggcaagaaaaatgaaagacacagacagtgaagaagaaattagagaagcattccgtgtgtttgataaggatggcaatggctatattagtgctgcagaacttcgccatgtgatgacaaaccttggagagaagttaacagatgaagaagttgatgaaatgatcagggaagcagatattgatggtgatggtcaagtaaactatgaagagtttgt

SEQ ID NO: 2727 - DNA, 480 bp, Homo sapiens
acttgagcccaggagtttgagaccagcctgggcaatacagtgagaccccatctctaccaaataaaaataaaaatgaaccaggcacggtgatgtgtgcctgtagcttcttgggaggctgaggtgggaggatcagttgagtccaggaggtcacagctgaactgagccgtgatcacaccactgcacttcagccttggtgacagagtaagaccctgtctctagaaaaaaaagaacacatcctgccgcggtggctcacgcctgtaatcccagcactttgggaggccgaggtgggcggatcacttgaggtcaggagttcaagaccagcctgaccaacatggtgaaaccctgtctctactaaaaatacaaaaattacccgggtgtggtggcggatgcctgttttcccagctactcggaaggctgaggcaggagaatcacttggacccaggaggcggaggttgcagtgagctgagagaacaccactgt

SEQ ID NO: 2728 - DNA, 294 bp, Homo sapiens
  misc_feature 280: n = A,T,C or G
cacactccagtgtcaaacccgtcagtagttactgagcagtgtgctatggaggagaagagcagagtgtggaatggagggacctcaactaatctgaggagttggggaccagggtggtgttgagggaaggagtctctgagaaagtcatgctatgctcagaggcattgagttagctgatgtgggtgggaagcatggaatccggagcaagggaggactgaggacacatgttgcaggcagagatgtcttacacacacaggctactgcattcacatggatacgttgnaaccaagcgtgttt

SEQ ID NO: 2729 - DNA, 458 bp, Homo sapiens
caagcagtgcaacggcacctccatgtgctggtgtgtgaacactgctggggtcagaagaacagacaaggacactgaaataacctgctctgagcgagtgagaacctactggatcatcattgaactaaaacacaaagcaagagaaaaaccttatgatagtaaaagtttgcggactgcacttcagaaggagatcacaacgcgttatcaactggatccaaaatttatcacgagtattttgtatgagaataatgttatcactattgatctggttcaaaattcttctcaaaaaactcagaatgatgtggacatagctgatgtggcttattattttgaaaaagatgttaaaggtgaatccttgtttcattctaagaaaatggacctgacagtaaatggggaacaactggatctggatcctggtcaaactttaatttattatgttgatgaaaaagcacctgaattct

SEQ ID NO: 2730 - DNA, 477 bp, Homo sapiens
actgagacaatggttagggttgttttcttaattcttttcctggtagggcaacaagaaccatttccaatctagaggaaagctccccagcattgcttgctcctgggcaaacattgctcttgagttaagtgacctaattcccctgggagacatacgcatcaactgtggaggtccgaggggatgagaagggatacccaccatctttcaagggtcacaagctcactctctgacaagtcagaatagggacactgcttctatccctccaatggagagattctggcaacctttgaacagcccagagcttgcaacctagcctcacccaagaagactggaaagagacatatctctcagctttttcaggaggcgtgcctgggaatccaggaactttttgatgctaattagaaggcctggactaaaaatgtccactatggggtgcactctacagtttttgaaatgctaggaggcagaaggggcagagag

SEQ ID NO: 2731 - DNA, 395 bp, Homo sapiens
  misc_feature 36, 60, 73, 102, 148, 157, 251, 271, 295, 308, 326, 385: n = A,T,C or G
acaagctttttttttttttttttttttttttttttnaacgtaaacagttacttttatttngagtaaaaatacncattcatatcattttcccttatatccctnaaatcttaaatgtgttcaatatgtctagaagatatctggggtctanctagccganacattttaaaaagccagctgctcctgacttatatagcacttacatatttaaatttacaaagccaaagcaacattttaaaggggtttgactgacnatagcttgatgcatccacanattcatttgttcccgatctggcantacaggaccatanaaaacaccaaacccagtntctcaataactgccagtccaaatgctattccaataactataatcaaattttttgccaanaagtctttta

SEQ ID NO: 2732 - DNA, 487 bp, Homo sapiens
acatttcccacatatgctcagggattatcttaattgtattcctttctgaagcttggaatcaagggaaaaaaagaacaataatgatttagggaaaaataatagttttttaaaggtagatttatagttagtaactttatataggtgaactgatcacagagaagggtgtaaatcatctgaataaacaatggattttcacacttactagaatctctaagaataatattttccatattacagctaaatgagacccattatgtatgctttcagataaactcacaaagctcttacccatgtaaatctcatagatctgccattattcgtaatgaataacaagttttatcatgcattttcattaaaaatgcattaatccctttgtagtaacctctccctaattcattgattcgataatacaagaacagtaaacatttctggcataacaaaaatgtggtatcaaagcatactgtatccataaatacaaaatgtaaca

SEQ ID NO: 2733 - DNA, 544 bp, Homo sapiens
actgtagtttgaatttgacacgggtaaatatcttgacagaaagtaaacaaaacagcatttaggactaaaaaattattcttatatctttagtctcttcctctggacaagtaacatggcccaactacatacacctaaaccagaaatgtcgtatgaatgataaagaaaaggcctattgtgtatttggcgcattgcagcttcttgctccaaatactcttgcttttacatcaaagcagacaacaaaaacaacactaaggcatagatcttgttggagtttgaggatgaggtgataactcctcattgctttagactaaaagattcctggatattcaaggaaagtaatttatttggccaagatatagagcaccatgcctggggcagagaccttaatagaaaacctaaggcctcgggccctcgttgagtcaacaaaagcattaagcaaggattgcccagggactaaagtaaggagacagactcatgtgaccaagacaggcaatggtccctaaacagcctgaggcaacacaacttcatgaggaaaggacttggt

SEQ ID NO: 2734 - DNA, 515 bp, Homo sapiens
  misc_feature 466: n = A,T,C or G
acaaaaacaatacaaataaaccaactgtattttacacataatcaacaggaaataatgtgggctaagtaatttggattaacattctcacttgaaaacatttagaaaagctggataaaatatacttttcaaagatgtaggaaggcagtagagagctgataagttggtgaataattaccatgccaataatatctgagaaaagatagaaattcagaaaaatgaaccattcatttgggaccactgtgttaggagtatttatagattgcaaaaggccactgggaagttgagtagatagagctaaggggctaaagattcaaaaagagtccagggtcagtgaagaggtaagggcctggtaactccaaaccatgctttgaaaccctgaatggttgaaccctagaaataaggatgaacagaagagcattaccacagtctgtggctcagctttcagtcacctaggtgacctggaaanttcagtatctgaaactggatcaaaataatcctaaattactaatgcaggt

SEQ ID NO: 2735 - DNA, 299 bp, Homo sapiens
ccggagcgcacgtcggcagtcggctccctcgttgaccgaatcaccgacctctctccccagctgtatttccaaaatgtcgctttctaacaagctgacgctggacaagctggacgttaaagggaagcgggtcgttatgagagtcgacttcaatgttcctatgaagaacaaccagataacaaacaaccagaggattaaggctgctgtcccaagcatcaaattctgcttggacaatggagccaagtcggtagtccttatgagccacctaggccggcctgatggtgtgcccatgcctgacaagt

SEQ ID NO: 2736 - DNA, 515 bp, Homo sapiens
actataatatatcctggcctaccagagttccatggatttaaataaataaaatttaattctgccttttataacatgcagggttgttttatggttgttgagttttgtgtgagtgtgtgtatttgtgtgtgcctctccttcttattgaaggattcagacagctataatgctaaaatgttttgtgtgtgtgtgcatgtgtgtatttttaaaacaatgtctatacttctgcctctattgatgccattcttttgttgaacctgtaaaggtaaggcccagattctgaaacctggttaaagtcactaatatttctctgtgaggccccttgttagctaccagccctcccctatccacactccctatcttgctgacatgtgtgtaagcccaaatcatcagtaatcacctcaaggctgatgacctgtaggcttataattcctcaattaatttttattgctcttacaatatttgtaagatgagtgagaatagctatttgacaccttaatatatatgtatggtatatg

SEQ ID NO: 2737 - DNA, 558 bp, Homo sapiens
gtgagaccattttcctatttgcagttacaaggttaaagaactttgaaggtcattcggctgctaagaggcatgtcgaacactctgtgtggctctttcacagtaaaccctcctaagagcagaagacacatggctgttagtgtctgcgtttagatttaatttctcaaataaaggcccttggctgcgtatcatttcatccagttataaactagggctcctgcaagcacccccattctaagggtgaattattgaaatcagttgctatttgatgagtcacaactggcccagcaggcagggcatttgaagtcatggtcatcaaaaagaaatgattgttttttgaaaagctaaatgcttaaaatgcttctagagggaagtcgtggggcgtgtgctcattctctttaaaatcagggttgttgagtttgtttttaaacatttttataagttcatgagaaaaaatatataaattctaagaaccaacactgtattcccagaaacatgaccctcgctggtcttgggtccacatatcattggactctgggggacacaaagatgcctgtgaca

SEQ ID NO: 2738 - DNA, 411 bp, Homo sapiens
acattgatcagttagggtggggcaggaacaaatcacaacggtggaatgtcatcagttaaggctatttttacttcttttgtggatcttcaattacttcaggccatctggatgtatatgtgcaagtcacaggggatgcgatggcttggcttgggctcagaggcctgaaattcctgccttcttatattaataagaaaaataaaacaaaatagtgttgaagtcttggggcggcgaaaatttttggggggtggtatggagagagaatgggcgatgtttctcagggctgcttcaagcaggggtaggggcagcgtgggaacctagaatgggagagattaagctgaagggagatcttgtggtaaggggagatattgtggggatgttagaagaacatttgtcatatagaatgattggtga

SEQ ID NO: 2739 - DNA, 385 bp, Homo sapiens
  misc_feature 292, 369, 376: n = A,T,C or G
acggtaactgactccagggtcactcatactgtgtccgtggtaacggtaagtctgcagctccatcaggatgggccccttcccagatctacaataggcagcagcaaaccttgttgcctctcggacgcacaggatatccattccatccactctcagcccaggaatgaaatcgcctctcttgtagtaatcagtgctggctgccgctctctcaacagacgttcccattccatagcgattattctcacagatgaaaatacaaggtaatttccacaaagctgccatgttgtaagcttcnaatatctggccctgtaagctctgcgagaatttctcggacggaaaggccccgggtgaaagtaaagccgtgagcccggnaggctgngatgagatg

SEQ ID NO: 2740 - DNA, 380 bp, Homo sapiens
acagactggccaacctgcctctacagcgtccacagcgaacacagggctagacaagggaggagtttctcaaacggttttaatcggttctctccgcgtcacaagccatcgggtaaggcaacggaatgtgcgtggggtcccctgtggctccgcggtcacaatactgagcctggaattgctgttagcaaaatatacatttgtgtcaccataaaaaaccgcgccgccgcccctcgggtctcacaacaggtataaaaaattataaatatttacacccttgttacacgcttttacggaaaggggatcctaggagagcccccgggacaggacgcgggggcggtagaaagagcacaaagacaggagcgcccgccttccgggtcccagca

SEQ ID NO: 2741 - DNA, 374 bp, Homo sapiens
gccaaaagtgtgcatttggctacagtggactcgactgtaaggacaaatttcagctgatcctcactattgtgggcaccatcgctggcattgtcattctcagcatgataattgcattgattgtcacagcaagatcaaataacaaaacgaagcatattgaagaagagaacttgattgacgaagactttcaaaatctaaaactgcggtcgacaggcttcaccaatcttggagcagaagggagcgtctttcctaaggtcaggataacggcctccagagacagccagatgcaaaatccctattcaagccacagcagcatgccccgccctgactattagaatcataagaatgtggaacccgccatggcccccaaccaatgt

SEQ ID NO: 2742 - DNA, 391 bp, Homo sapiens
ctgcccagccccttttctctgctcttgtttcactccaccatcactcactcactccccactcccccacccatggggaggagacctttgatgaattcttcctctccttcccacaaaagacagacccagtgagtgaatcaggcaaagtgcttataatgtgtgttgtgtgagcgtggccttgggaggacatgcgtgtgtcagggatgagttgaggtgatatttttatgtgcagcgacccttggtgtttcccttcctcggtggctctggggtatgtgtgtgtgggtgtgtgcgcctgagtgagtgtgtgtgcttgaatgtgagtgtgtatgtcagtggtttctacttcccctgggatgctgacccaggaatagtggacatggtcacagtcctatgt

SEQ ID NO: 2743 - DNA, 516 bp, Homo sapiens
  misc_feature 516: n = A,T,C or G
acattttcatgagcagtaattaagatatgttgaaattttaaatgtgaaagatttcaaagtttcagtatgttaacattactcttcaaatgttcttaatatatatataaacacttacaaattatagatacaactagttgtatatctacaatacatatatgaacaccattcttcttctctagccatatttatatgaggataaagtaataaatctctgtgctattcaaggaaaaaaaatgaatgctttaaaaaataaatctttaaagaatagtttcaaaaataaagttcaaatattgcacaaaataatttaactgtaaatattactacatagtgtaaaacaattttaaaaaaatttttacactctacagtaaatcccactttctaattctataaaagaatttattggaagtccacattaaatgtttagatattaaatgcttacattcagtttgatgggaattcaattttcacaagttagctgagactttgtcttaaaagttcatctatttgagttttgtn

SEQ ID NO: 2744 - DNA, 360 bp, Homo sapiens
acaaagatctgacatgtcacccagggacccatttcacccactgctctgtttggccgccagtcttttgtctctctcttcagcaatggtgaggcggataccctttcctcggggaagagaaatccatggtttgttgcccttgccaataacaaaaatgttggaaagtcgagtggcaaagctgttgccattggcatctttcacgtgaaccacgtcaaaagatccagggtgcctctctctgttggtgatcacaccaattcttcctaggttagcacctccagtcaccatacacaggttaccagtgtcgaacttgatgaaatcagtaatcttgccagtctccaaatcaatctgaatggtatcattcac

SEQ ID NO: 2745 - DNA, 298 bp, Homo sapiens
ctttttttctttttctagaactactaattatctctcaaggctgaaaaattaattgccttaggtggagaacttaattcctagtatccaccaaacttaactccgtatctccatatggtgtctccatatctactgtgtgagctacttaactgacgccctcttcctccaactgaaggatcgcccaacgtttttggattatagaattattatttcctgctttctttctttgggacttttgaatttctttggtttcgtttttaagaagtaacccaacatttcctacaacactaaataaaatggt

SEQ ID NO: 2746 - DNA, 470 bp, Homo sapiens
  misc_feature 405: n = A,T,C or G
ccgggcaggtacagtattttggcttatgagtatatcaatatttgtaactgatcccctattttagacttttttaggtggcttctcatttttcatgaatcagagcacatagactgaaaaaccccgcctttttaaaaacagcacttctcattgggaccccaccaaatgcagaggcgtaggcccttcagtttgaaggaagctgagcaggcagtgtgccaggccctgggagacagtgggaaggtatcgtccctgtttatcagatgaggatgccgaggcagagttaaggaagcgaggcatgtgagcacccaggagttaaggcaggcctgtgctcgaacgtggcttcctgcacacagccccgccctctgcggccagtgccacacatcacacctgaagctccagctctctggnccccaggcctgagtctctcccttgctccccgctccccgccaggctctgctctgaatgactctcct

SEQ ID NO: 2747 - DNA, 316 bp, Homo sapiens
accatcaaatcagatttctgtttttttgttaaaaaaaatttttttaatcagtattgtttttacaagtaatatactttgaaactcttgaactaatagtctcaaaaactctagaggacagtctgagaacacgtatttctattgttctaaataaatacatgtttttgaatagttcaatcatgaattattgactatgtcttcatcaaaagtgttaatccctctcagggtctctggtgaagaccttcaagagtttggttttttctcccaggaaattggaaggtagaattgtaaattcatagaacttcttttataatggtgt

SEQ ID NO: 2748 - DNA, 123 bp, Homo sapiens
  misc_feature 86, 91, 115: n = A,T,C or G
actttttaaaattattagatttaagtctaataactagactctaaaatctacaaggcaagaaacatgtcctatccccattactgtanctaanactgcatgcttactacaaaccaancaccattt

SEQ ID NO: 2749 - DNA, 587 bp, Homo sapiens
  misc_feature 509, 544: n = A,T,C or G
acagaaatgaaagaatcctggcagtgattgatttttccacagagcaaacctttttgttcagaaatgagctccttaaagtcaatgattttgagaaaaaccacacttcaaatatgatacacatcatgtgaactactttgctgagtgattttcaagcaaagtatatcactaagtataaaagataaaaggctcatgctcatgctgtttcataatagccatctccatttgtagtaagaataatcagaatgatcccccttgaatttcagcctgaaaaatgtatactgcatagatctggtattcctttaatgcacaggcacatatgaccatggactttataatactggatttggcagccttttatctcaagaggatttctcaagtttcatagtttacaacttaaatattcctctgaaggtatttaattttttttcatggagcaagagtaaattctgtgatgatgaagcctctgaaacatgaatttcaaaatgttaacactacaaaagaaaaatgcnagagaagcattttctgtgttgaaatgactgaagtnaagtgagttatcactggcatattctctttcagtgttctaggat

SEQ ID NO: 2750 - DNA, 117 bp, Homo sapiens
cgagcggccgcccggcaggtacaagctttttttttttttttttttttttttttcttttttctttttttttttttttttttttttttttttttttttttttttttttttttttttttt

SEQ ID NO: 2751 - DNA, 368 bp, Homo sapiens
accagttgctccagtttcctaggatttgggactctgtaaaaatgagaaagtcccaggcaaactgggacggttggtcctacaagaaaaagagcagcatcagagtgttggctatagtttggaacttaggaacaggatcagacattattttttaacttctccacctattttccctttagctgtgaaataaaaatcccccttgttattactgagggtgttacagctttcagaggcttttttaccactgggtttcatgtaattttgacttaatacctatgtcaagcctgggaagaaaggcagttctaatcaacttgcaggtgtggcattctgcttcaagccacctgcatcctagagagcaaggattcaaactc

SEQ ID NO: 2752 - DNA, 530 bp, Homo sapiens
  misc_feature 516, 517: n = A,T,C or G
acatctgcatcctctgcttgaccacttccgcagggttcatggctgcatcatgaagtaatgttgccacacacccggccgcacctgcaaacaagaaaacaactgccacatgtaaggccaagagagctgaccaactcattgaggtcccccagtgaaggggagtggctgtgctacactacagcggggaaaagtaacgttaagagctagtccaaaagatggggacccactgctcctaaactcctgtttaagaaggtaaagtatctgttcccaccaactttgtaaggtcactaatgtattccacatccatgataggaaggtcagctcaagtcttatcaataaagatcattctgagaataaatgcagctcacaccccagacaggaagcagatacactgctgcctagggatgccagcacatcacctgccaccagtggagggagatacgggggccaggtggtcagatctcacagaacctcaccacagaatcccacctcagtcctgccgcagaacccatttgcagnncctaacatttgtc

SEQ ID NO: 2753 - DNA, 424 bp, Homo sapiens
acagctcccaagtgctccctatccagtccaaaggaccctcttgattacagcacaggaacttgatcgttggggaaccccagccccttggaacttggaagacccgtgtttcctggaccgcgaatcagtgtgttgggcatcagtgttttctgcaagggttgtgacctgaaactttttaaaaaccacccacctttggggaagcatttctgaatttatccatcaccaaccatttcttcttggataccatcaagtaacagctattatttgccaagtggagctgtcatttaatttgatgcacctctggattcagatgaaacattaaattgtcttcctcgattctccatcgggtgtagagtttttaaactatcaatggcatttcaagtcttctgaaacaacatggctgtatgtgcgtggtccatagcacagt

SEQ ID NO: 2754 - DNA, 276 bp, Homo sapiens
acttgaaactgcatcataaatgcaacattgtcatatgtgaaaacgacaccctaagtccttctttttaaaaatgacattgcgtttagcttattgtaagaggttgaacttttgtattttgtaactatctttaagctcttcagtttataattcatataaaatgccttttgtatttaaaataatcctattttaatcagtgcatgaaatttgcttttttaaagttcatttgaatgattattccttccctctaaagaaatgattttggtaatgttgagaggt

SEQ ID NO: 2755 - DNA, 123 bp, Homo sapiens
  misc_feature 120: n = A,T,C or G
acacacatttacaatggctttggaggatagcagtgctgcgaaaagggcttcaggaggatccggcctgggacaggattgaggtatgttgcagcctccagggcctggggtctcctgcatgantat

SEQ ID NO: 2756 - DNA, 515 bp, Homo sapiens; identical to SEQ ID NO: 2555

SEQ ID NO: 2757 - DNA, 332 bp, Homo sapiens
caagacgttagccttggtgctacgctaatcacaaaagtgctagatgggccgggtgcgatggctcacgcctgtagtctcagcactttgggaggctgaggagggcagatcacgaggtcggggcattgagaccatcctggctaacacgatgaaaccatgtctctactaaaaatacaaaaattagctgggtgtggcagcgggtgcctgtggtcccagctactcaggaggctgaggcaggagaatggcatgaacccgggagatggagtttgcagtgagccgagatcgcgccactgcactccagcctgggtgaaagagtgagactccgtctcaaaaaa

SEQ ID NO: 2758 - DNA, 593 bp, Homo sapiens
acttgacaaaataccccataaaattcaaaacttctaccattatacaaaaataggtctctacaagtgatattatctgtcttcatcaccagtagaatatattaggcaaaacatgtaacttcagtagccttataagaaaagtgcaggacacctcgagctacacattcagcagtattgtaatgcgtaaaagtttaatcttttcacccatttgataaatacacaaggtttataatttaatgttttaaattagcattccacaaatatacaggtaattcaataattattgtgcatgaatacatacacaatgcttatatatacaaattccagtttgttttcatgtgctggcaagggatttgtatacaatcataagctgtgttcatattggtcccattgaatattcacaatacaaaagcacaaaagaaccattgatttacaaaaggaaatctatttaaaatcacttcaattaatgatgtttcaaaggattatcttctcatgccagcatgaaattgagtagttgaacctgactgcatagttccaagtcgtctttgcagtgcctctagccgagtgatataatctgttagggctctgtcaggatc

SEQ ID NO: 2759 - DNA, 358 bp, Homo sapiens
accactggcatcgtgatggactccggtgacggggtcacccacactgtgcccatctacgaggggtatgccctcccccatgccatcctgcgtctggacctggctggccgggacctgactgactacctcatgaagatcctcaccgagcgcggctacagcttcaccaccacggccgagcgggaaatcgtgcgtgacattaaggagaagctgtgctacgtcgccctggacttcgagcaagagatggccacggctgcttccagctcctccctggagaagagctacgagctgcctgacggccaggtcatcaccattggcatgagcggttccgctgccctgaggcactcttccagccttccttcct

SEQ ID NO: 2760 - DNA, 407 bp, Homo sapiens
actaggtgaaccattgagaaagcctctaagtataacacaaaaggtagacactataaagaaaagacaggccatttcatttacataaaaatgaaaaattggccgggcgcggtggctcacgcctgtaatcccagcactttgggaggccgaggtgggcggctcacaaggtcaggagatcgagaccatcctggctaacgtggtgaaaccccatctctactaaaaatacgaaaaattagccgggcatggtggcaggcgcctgtagtcccagctactcagaaggctgaggcaggagaatggcatgaacccgggaggtggagcttgcagtgagccgagatcacgccactgcactctggcctgggcgacacagtgagactccgtctcaaaaaaaaaaaaaaaaaaaaagcttgtac

SEQ ID NO: 2761 - DNA, 184 bp, Homo sapiens
acacattgtattaacctttctactccaagtgaaaatgtgcatagaaactataaagatagcaaacatatttacatatattttacagattctaaagtgctgataaccagctaatgattctgaatcatgggctcagatgttttagagttacatgttatatagtttagtttattgcacatgtaaatgt

SEQ ID NO: 2762 - DNA, 366 bp, Homo sapiens
  misc_feature 333, 337: n = A,T,C or G
acattggtatctacaagacattatagagcacctgaagttattttagccctagggtggtcccaaccatgtgatgtctggagcataggatgcattcttattgaatactatcttgggtttaccgtatttccaacacacgatagtaaggagcatttagcaatgatggaaaggattcttggacctctaccaaaacatatgatacagaaaaccaggaaacgtaaatattttcaccacgatcgattagactgggatgaacacagttctgccggcagatatgtttcaagacgctgtaaacctctgaaggaatttatgctttctcaagatgttgaacatgancgtnctctttgacctcattcagaaatgttggag

SEQ ID NO: 2763 - DNA, 425 bp, Homo sapiens
actcctcccaccccattgccagcaagaggccatgactcacctcaaccccaagtcctgcatcctggtgggaagtgacaatgcctcctcccagctctccatacctaatggggtcatgaccagacagggtaggacccaggcccccagcttcagttggtaacggtggcctccacggctgccccctgtccaggtgacaaccccagcccccatgatggggcagcaaaggtctcttctcctccttggtcctcagcaacagacagagccctccacaccaggcaggacagaggcaaagtcagaagcagcagcggtggcagggaaggagcagccagcacaggcccagggctctcctgaagtcatttaagctgtctgccatgcggctctgggactggccactaggtgggcgtaggcggctgtgatacaggtacctc

SEQ ID NO: 2764 - DNA, 192 bp, Homo sapiens
atcactggaggccacgagtttgagaccagcccgggcaacacagtgtgagacccttgtctctacaaaaagttaagaaattagctgggtgtggtggtgcacctgtaatctcataatcccagttacttgggaggctgaggcaggaggataacttaagcatgggaggtcgaggcttctgaactgagctatggtcgt

SEQ ID NO: 2765 - DNA, 319 bp, Homo sapiens
acagattgtctcagttatacaagtggcaagaagaggacagtggaccagctcctgggaccttccaaaacattggctttgacatctgccaagatgatgattccatccacctggagtccatctatagtaatttccagccctccttgagacacatagaccctgaaacaaagatccgaattcagaggcctcaggtaatgacgacatcattttaaggcatggagctgagaagtctgggagtgaggagatcccagtccggctaagcttggtggagcattttcccattgagagccttccatgggaactcaatgttcccattgtaagt

SEQ ID NO: 2766 - DNA, 238 bp, Homo sapiens
actgttattgaaaatatatttaatacctttggaaaaatcttgggcaagatgacctactagttttccttgaaaaaaagttgctttgttattaatattgtgcttaaattatttttatacaccattgttccttacctttacataattgcaatatttcccccttactacttcttggaaaaaaattacaaaatgaagttttatagaaaacaaaaaaaaaaaaaaaaaaaaaaaaaaagcttgt

SEQ ID NO: 2767 - DNA, 493 bp, Homo sapiens
ctgctcatgtagatctataaatatgtgttgtatgtcttttttgctttttttttaaaaaaagaataactttttttgcctctttagattacatagaagcattgtagtcttggtagaaccagtatttttgttgtttatttataaggtaattgtgtgtggggaaaagtgcagtatttacctgttgaattcagcatcttgagagcacaagggaaaaaataagaacctacgaatatttttgaggcagataatgatctagtttgactttctagttagtggtgttttgaagagggtattttattgttttttaaaaaaaggttcttaaacattatttgaaatagttaatataaatacataattgcatttgctctgtttattgtaatgtattctaaattaatgcagaaccatatggaaaatttcattaaaatctatccccaaatgtgctttctgtatccttccttctacctattattctgatttttaaaaatgcagttaatgt

SEQ ID NO: 2768 - DNA, 173 bp, Homo sapiens
  misc_feature 35, 46, 66, 126: n = A,T,C or G
acaagctttttttttttttttttttttttttttcnacaatttactntttattgattaaaaatgaanaaaacatgcagtaaaatacaaagtccaaaaaaaggaggaaaaagttgaatattttacatnttccataacctagcatacatcatgaggaggaatctccacttatgggt

SEQ ID NO: 2769 - DNA, 392 bp, Homo sapiens
accccatgggccccatggtgtcccaggcccccatggacctcctgggcctccagggcctggaactccaatgggaccatacaaccctgcaccttataatcctggaccaccaggcctggctcctcatggtcctccagccccatatgctccccagggatggggaaatgcatatccacactggcagcagcaggctcctcctgatccagctaaggcaggaacggatccaaattcagcagcttgggctgcttattacgctcactattatcaacagcaagcacagccaccaccagcagcccctgcaggtgcaccaactacaactcaaactaatggacaaggagatcagcagaatccagccccagctggacaggttgattataccaaggcttgggaagagt

SEQ ID NO: 2770 - DNA, 171 bp, Homo sapiens
gagaaaactatgtagcaagatccacttctgtgattaagtaaatggatgtctcgtgatgcgtctacagttatttattgttacatccttttccagacactgtagatgctataataaaaatagctgtttggtaaccatagtttcacttgttcaaagctgtgtaatcgtgggggt

SEQ ID NO: 2771 - DNA, 295 bp, Homo sapiens
actcgctcataggatggtaggtatcccgggctggaaagatgtccagctgcccgtagttctttcggcggcactgacagacagccaaggcaatgagatagacaatggccagcgcaaccagaacacagaccagcaccagcagcgcgatgccccagcctggcaccccagccccagactgggcagagaaaggaaatggcacatcactcacgctgacgtctgagatcgtcaggttatatcgagaggctgcttccgttttatactgattgaactgtgtctccacgtcgtggacattgatggt

SEQ ID NO: 2772 - DNA, 268 bp, Homo sapiens
  misc_feature 211: n = A,T,C or G
acagcctggatattgagactttttaaagctctgactgtgtacaagctttttttttttttttttttttttaacttttagaaggagaacaattttattctaaaaatagaacttggtaacaatgaaataccaaaagctggtcattataataaaaagaaaagaagagtttaactttttttttgtgaaaatacaaaattatcactataatatactnccaactctgtttatctgtatttgaattattcctttcatggattattcaaggaaattt

SEQ ID NO: 2773 - DNA, 319 bp, Homo sapiens
  misc_feature 290, 307, 316: n = A,T,C or G
acagattgtctcagttatacaagtggcaagaagaggacagtggaccagctcctgggaccttccaaaacattggctttgacatctgccaagatgatgattccatccacctggagtccatctatagtaatttccagccctccttgagacacatagaccctgaaacaaagatccgaattcagaggcctcaggtaatgacgacatcattttaaggcatggagctgagaagtctgggagtgaggagatcccagtccggctaagcttggtggagcattttcccattgagagccttncatgggaactcaatgtncccattgtnagt

SEQ ID NO: 2774 - DNA, 435 bp, Homo sapiens
accaccagatacttaaagcttcaaaaagactgcccctaccaccacaggaggaccagcctaaccatacgctccaaaagatggctgtgatagatcttgtgaagcaattactgagcagatcaagatctttgggaaggaacactaaagatgttttgaatgaattatagtccactggcattttagtgtatttttttttctttttagaaacacacatttctaaaaatgtcatgttacattcctgcatgtcccttttgatagcattagtggatccattggatttcttttttctttttgtgagacagcttttagtcttacctgaatttatgtgtgtttttccgacagtggttaataattatattggtgatgtagcagcaattgtgttggcagggttttcatatattattagtaattaacactaactgttggactgacttgtgt

SEQ ID NO: 2775 - DNA, 438 bp, Homo sapiens
acaaaactaacagtgattaatcatgaatgactgctacgcctcaagactctaaaacagacaaaccctggctataaaataaatctgatctagaattaatattataaaaacacaacaaaaatacttgaaaattacatgtttattttaatataatctctgatcattcaacattttttactgtcacttctactgtcaagatggttgagagttgacagtttgtctagaagaaggctgatatatgtcaacatggtcagcaaaggatttaaatatgggtctttgaataataaatagctaataattgagtttattaaaatgaatttttgtataatttaggcagttgaaggtctagaacagcctgcgttcctttctatggcagcttgctatgaaattcatgtttcaaacaaaacaatactttttcatgcatagataaattataaatgt

SEQ ID NO: 2776 - DNA, 436 bp, Homo sapiens
actgagaagtgctttgcagcaaccctcgcagcttgtgtgatgatgcagaagaaaatctgatcatgttcaccctgctttgacaatgagccttgcccattggagaatgttcaatcaatagtagacctaaaaaaaatcaacttgttgctttcatctttttattgatagcacagccagagctaccaaaatgatttactggattctagcaaattaataaatacagtaatttgattgtaaaaggaaacattctacttggacattttagtagaaattgctagagggaaggagctcctggcatacattctacttggatagaagagaagatagcacaggaggagaactggacagtccaggtatagattgttgagattagggattcagcagaaagcaaagcaaatgttctcattgttcttttgaggtacctcggcgcgaccacgct

SEQ ID NO: 2777 - DNA, 214 bp, Homo sapiens
  misc_feature 75, 170, 179, 196: n = A,T,C or G
acaagcttttttttttttttttttttttttttttaatatttcaaatagtttaattttaaaaatattctattcagngctaaaatatgtcttcactcactgttgcccatttccattttcttaaacttttttgaaacaaaaaataaaatcacaaagttcaattcaacatgcanatttcaaanaaaagggagctttctanaaactgagctgaaggggt

SEQ ID NO: 2778 - DNA, 198 bp, Homo sapiens
acgctgcttcttcagagcaatacgccgccgtttgtgctgcaggacacgtggagtaacaagacgctgaatcttgggtgctttggtcctaggtttcttaccttctttatttaagggctttcttacaacatactggcggacatcatcttctttagagagattgaaaagtttgcggattctgctagctcttttggggcccag

SEQ ID NO: 2779 - DNA, 277 bp, Homo sapiens
  misc_feature 34, 37, 83, 107, 114, 168: n = A,T,C or G
acaagctttttttttttttttttttttttttttnganaccctcatcaatagatggagacatacagaaatagtcaaaccacatntacaaaatgccagtatcaggcggnggcttcnaagccaaagtgatgtttggatgtaaagtgaaatattagttggcggatgaagcanatagtgaggaaagttgagccaataatgacgtgaagtccgtggaagcctgtggctacaaaaaatgttgagccgtaaatgccgtcggaaatggtgaagggagactcgaagt

SEQ ID NO: 2780 - DNA, 597 bp, Homo sapiens
ctgactcagctaacaatctagccctgggggaatgtgatctacctgatgcgaccctgagttctccccagagcctcctcctgccccaccagctctcaagtaccttttctcctggactgtgtggacccacccagctttcttcctccctgttgtgtgtcagattatgccttgcacttgggaaagctcttgtgagactctcccaaggtgctgtatttttctacctcatggagtattctcccagaaactgcaatgtatttttttaggggagtatctttaacaaagcaggatgattcttctaagtttggcgacaagaaggcttggatctgagtcttctacctggcaggatgccaatcctgtttgttgtccgtatgtcctgaaaacatgagggactggcagatgtcattttggtctaaagagctgacttgtttgaaattcagccttaaattaagctcttagttgttcagcttggggggcaactttgatttttctctgtgttgtagtctctcatatttactcaaggagggaccaggatgatacagtcatctgaggttatgctttgcaaaaaggctgacggtatggaatatgtttccatgtctgagt

SEQ ID NO: 2781 - DNA, 362 bp, Homo sapiens
gtcctatctgtaatcctttgctcataaagtatattagttccttacaaaattcggctgttaattatctgatttagagattattggtttatctggtgtgtgtatatatatatttattattagaaataggctatttcttgcagtatctttctctatgatattttatacagaaggttttataaatatagattattttgtttacttataattttaaaggtaagcttgactgcactcatttaatttgcctctggagtcaggagtttacagttcttcccctgtatctattaataagcagtttgactaatattactagaagctttaatctttaattttggcatttgttttgcagatgctctacccatggt

SEQ ID NO: 2782 - DNA, 414 bp, Homo sapiens
  misc_feature 406: n = A,T,C or G
acaagctttttttttttttttttttttttgactccatcaccccccaaggtttatttaaaagttatagaaaagcatagcctgggaggggcatccttgaactgaccagagttttggagggacccagagggacacactggcatggcccggggtggacggcaagaaacagaaagtgagagaggtatcctaagtcttctctacaagagccactggctgcccaggattgctgctggtccccggagcggcaaaaggcttaaaatcaggccaactccctctttccagttgccagacgggcaggaggtggtgggggtgcaaagggaggaccaactcaggtgcagggattaagacttgacccaaaagacagaggcgtggggacagctgggtctgtagggcgacggttttatcgganaaagatcc

SEQ ID NO: 2783 - DNA, 428 bp, Homo sapiens
actttgtaacaataaagtgctgtgcacagaaaggagaaatgccattatggggatgtgtgtgccgacctgggaccagcagggtgaaagagtctatcattcatgatgagagctgccatttgcgctaagcacacaccatgtgccaggcactatgccaagaaattgttgaatcttcacaataactctgtgagaaaagggctgtcattggacagatgaggacactgatgctcccaggggtccacatcacatgaagaggaggtgacagggctgggccttggtccgaagctccagccttccaagccaaggcctgtgagaggaaccgctgagacctgatgttaggcctgtttttctcatgtgccctggagaaggggactaacaccatcttttgccaaagtttggtgagggatggccaagagctctttgaaactttg

SEQ ID NO: 2784 - DNA, 541 bp, Homo sapiens
accctaaaaggcagctcatgggctcagggtgacagataaccagaagtgagccgggccatctactcctgagatggcaaccatttcacaccattctcaagcaccatctactcttcccccttgatgccatggcagacgtgggaggatcatttatgcaggtagtcattccaggagtttttggtcttttctgtctcaaggcattgtgtgttttgttccgggactggtttgggtgggacaaagttagaattgcctgaagatcacacattcagactgttgtgtctgtggagttttaggagtggggggtgacctttctggtctttgcacttccatcctctcccacttccatctggcatcccacgcgttgtcccctgcacttctggaaggcacagggtgctgctgcctcctggtctttgcctttgctgggccttctgtgcaggacgctcagcctcagggctcagaaggtgccagtccggtcccaggtcccttgtcccttccacagaggccttcctagaagatgcatctagagtgtcagccttatcagtgt

SEQ ID NO: 2785 - DNA, 511 bp, Homo sapiens
ggtgagtggacgcaatgaggcggaggcccgggagaaggcagccaaggagttcggagtgtcccctgacaagatcagtctccagcaagatgaggatgtattggatacctggttctcctctggcctcttccccttatccattttgggctggcccaaccagtcagaagacctgagtgtgttctaccccgggacactgctggagaccggtcatgacatcctcttcttctgggtggcccggatggtcatgctgggcctgaagctcacgggcaggctgccctttagagaggtctacctccatgccatcgtgcgagatgctcacggccggaagatgagcaagtctctaggcaatgtcatcgatcccctggacgtcatctatggaatctccctgcaggacctccacaaccagctgctgaacagcaacctggatcccagcgaggtggagaaggccaaagaagggcagaaagctgacttcccagcggggattcctgaatgtggcaccgatgctctccggttt

SEQ ID NO: 2786 - DNA, 545 bp, Homo sapiens
  misc_feature 2: n = A,T,C or G
ancctggagggtccccaagctgctggtccggggcgtggcagtcagagtggaggaggaggggacagactggagcacagctggatccacgatgcaaacctttggccccacagaagggttaacatgcccagaggacacacagcaaggtgccccgtcactgctgctcggagatcttcttggccacagcacctgccctctgtcccattcaattcaattcctccgcaacctcaaggagaaacagctgagctagaagcagaccctccatcctgctctgcatctcagggacagatgaggtgggagcgcaggaagcccttagagagcgggcctccaggtaagagtcaaagtgctttacaaacaaatctgggcctttgtagagaacctttggggcaggatgtgtctagctaccaaaaagctagtgcttcagcccacaagggcgaacgcaaacccctaaacctgtcccctcaaagagaacagtggcccatgatggttcatcattttgcgattgtttaggggagtgtttttctcttccagctcccagggcatgtagc

SEQ ID NO: 2787 - DNA, 497 bp, Homo sapiens
acagtggcactgtatatactatttatagtctcagctactagggaggctgaggcaagaggcttgagaccaggagctcgaggctgtaatgtgccatgatgattgcacctgcgaatagccactgcactccagcctgggcaatatagcaagaccccatcctttaaaaaattttagaacttttttaaaatcaaagtgcagattgcttgtatgtaaaacccaaataaaggtagagtaagtgtgatatatgggagtattaaaatagcttaaaatttctcgtgaaggacatgtggctaaagggtcaaaaaggatgtaagacttggagccagagcatagtatttcctgaaataacaagtttagtgctttaactatggctacatgtgcttaaggaattttgagccacttatttttgaagatgctgaggacatgtagagtgctttttgtagtgagctaaccttgatctctaaggactaactacccaggtccaggtcttcactaggggt

SEQ ID NO: 2788 - DNA, 521 bp, Homo sapiens
gtttgaaaaaaagatcagctttccctgaataaacaaaaatgaatgtaaataaacatgaaaatacaaaaccataatttccaaaaacgaaatgaatgggccaacagtaaaatgcacaatgagccacaactgccctggtatttaagaaaataaaggtcaactgtgggtcataaagaagtatcaacttttaaaaatatatgtatgtattgctactcatagcatactctgacctaaaagaggcagatactgattttatagccagtgacaaaaaatttgaacggaattgcagaaccccctgcttgtgatcactatatgaaatggaagaataattgaaatattaaaatagatcctgagcccctcagccgctaatattgctgaaaaagtgctccaaaagaataaaattatgcttctgcaatttagtcatgcaaacttcattgttttcctgttcacctagggccagttctttgaaaggcacagtttacagtttctgcactagtttgggcttttgcatactgagcttaggt

SEQ ID NO: 2789 - DNA, 363 bp, Homo sapiens
  misc_feature 53, 225, 271: n = A,T,C or G
gtcctatctgtaatcctttgctcataaagtatattagttccttacaaaattcngctgttaattatctgatttagagattattggtttatctggtgtgtgtatatatatatttattattagaaataggctatttcttgcagtatctttctctatgatattttatacagaaggttttataaatatagattattttgtttacttataattttaaaggtaagcttgacntgcactcatttaatttgcctctggagtcaggagtttacagttcttnccctgtatctattaataagcagtttgactaatattactagaagctttaatctttaattttggcatttgttttgcagatgctctacccatggt

SEQ ID NO: 2790 - DNA, 316 bp, Homo sapiens
ggggcaccaagctgagctgcagacacccagtaggcgtgaggcaaatgcgtcccattttaagaggcttgtatttatgagctctttgcttcctccctcccactatctttaaagaattgctctccatctcctttggcaaagttcctttgccctttgtcttatttttgtgaaaccctccaaggtatttccagtccatttgcatccaatctggcatctttacggagagcggtctcatatgctattgttgttaacgtggactagtatttatgtgttgagaacactggctgtttgtcaggaaaagtgtgccaaaacaaagagt

SEQ ID NO: 2791 - DNA, 84 bp, Homo sapiens
acttcagttggtgcacaaaatactgtcatttgctcaaagctggctgccaaatgtttggtgatgaaggcagaatgaatggctcaa

SEQ ID NO: 2792 - DNA, 236 bp, Homo sapiens
  misc_feature 127, 180, 203, 230: n = A,T,C or G
acctgctttgcatttcatttgctctgtttttcagaactacactttacgacatgagaaaaactggtataagcagaatgttcctacatttagttaatatcagttctaatttaatacataaatgacttgntcaaatacttacttagactccatgtaagggaggagaaaaggggagaaaattanagtgggggaagatgaatcaaatnacatttgtagaccacactacaacaatnggaagc

SEQ ID NO: 2793 - DNA, 559 bp, Homo sapiens
  misc_feature 477: n = A,T,C or G
actgcaacgactgctatctcagattcaaatctggacggccaaccgccatgtgatgtaagcctccatacgaaagcactgttgcagatagaagaaggggtggttgctgctcatgtagatctataaatatgtgttgtatgtcttttttgcttttttttaaaaaaaagaataactttttttgcctctttagattacatagaagcattgtagtcttggtagaaccagtatttttgttgtttatttataaggtaattgtgtgtggggaaaagtgcagtatttacctgttgaattcagcatcttgagagcacaagggaaaaaataagaacctacgaatatttttgaggcagataatgatctagtttgactttctagttagtggtgttttgaagagggtattttattgttttttaaaaaaaggttcttaaacattatttgaaataattaatataaatacataattgcatttgctctgtttattgnaatgtattctaattaatgcagaaccatatggaaaatttcattaaaatctatccccaaatgtgctttctgtatccttccttct

SEQ ID NO: 2794 - DNA, 286 bp, Homo sapiens
  misc_feature 67, 175, 213: n = A,T,C or G
ccagcttctacctataagacttcaactcaagatgcaggatgggcagatagatgctgatgaattgcanagatgtctgacacagtctggcattgcctggaggatacaaaccttttaacctggagacttgccggcttatggtttcaatgctggatgtatcctttactttgattgttgnctagaataattttttctaaaattctaaaggaattcatnttagaattaatatctagtaaacacaaagtaataaatgatcactaaaaagctttctgaaataattagcttctat

SEQ ID NO: 2795 - DNA, 242 bp, Homo sapiens
  misc_feature 172: n = A,T,C or G
caacaatggaggagaaaaaagagctgacagtggagaagaagagaacaccaagaatggaggagagaaaggagctgatagtggagaagaaaaagaggaaggaatcaacagagaagacaaaactgacaaaggaggagaaaaagggaaagaagctgacaaagaaatcaacaaaagnggtgaaaaagctatgtaaggtatacagggaacagcactctagaagctatgactcaattgagactacaagt

SEQ ID NO: 2796 - DNA, 156 bp, Homo sapiens
  misc_feature 23, 27, 29, 45, 53, 56, 58, 90, 95, 131, 143, 150: n = A,T,C or G
gaggtatttaagggaccacttangacnanattagatgggcttttntggatttnttncncatttgtcacaggtgtcttgtgattgaaaatnatgancgaagtgaaattgcattgaatttcaagggaatttantatgtaaatcgngccttanaaacac

SEQ ID NO: 2797 - DNA, 144 bp, Homo sapiens
  misc_feature 139: n = A,T,C or G
ccaccaccaagaggcgtcaccagcagaccgtaaccatcccccccaagtcctcgttgtccgttccatatgtcatcgtgccgctaaagaccggcctgcaggaagtggaagtcaaggctgccgtctaccatcatttcatcantgacg

SEQ ID NO: 2798 - DNA, 425 bp, Homo sapiens
  misc_feature 89, 186, 381: n = A,T,C or G
gagacacagtaggagtagatctccaacaatcaaagctagacgtagcaggagtagaagctattctcgcagaattaaaatagagagcaatngggctagggtaaagattagagatagaaggagatctaatagaaatagcattgaaagagaaagacgacgaaatcggagtccttcccgagagagacgtanaagtagaagtcgctcaagggatagacgaaccaatcgtgccagtcgcagtaggagtcgagataggcgtaaaattgatgatcaacgtggaaatcttagtgggaacagtcataagcataaaggtgaggctaaagaacaagagaggaaaaaggagaggagtcgaagtatagataaagataggaaaaagaagacaaaganagggaacgtgaacaggataaaagaaaagagaaacaaaaaaggga

SEQ ID NO: 2799 - DNA, 55 bp, Homo sapiens
  misc_feature 21, 32: n = A,T,C or G
acaagatacactggagaacanagggaactcangattcttccagccacatgtcacc

SEQ ID NO: 2800 - DNA, 363 bp, Homo sapiens; identical to SEQ ID NO: 2089

SEQ ID NO: 2801 - DNA, 175 bp, Homo sapiens
acccattgaaacctgcgtatttgtgtatagcagaactctgaaataatattctgatagcagttatctctgaggaattgggttataggtgattttccctttccgcatgataaatttatgtaatatttgactgacttgaccgtaagtatgttacttgtataataaaaggaaaaaaggt

SEQ ID NO: 2802 - DNA, 288 bp, Homo sapiens; identical to SEQ ID NO: 2091

SEQ ID NO: 2803 - DNA, 246 bp, Homo sapiens; identical to SEQ ID NO: 2092

SEQ ID NO: 2804 - DNA, 515 bp, Homo sapiens
  misc_feature 484: n = A,T,C or G
acattttcatgagcagtaattaagatatgttgaaattttaaatgtgaaagatttcaaagtttcagtatgttaacattactcttcaaatgttcttaatatatatataaacacttacaaattatagatacaactagttgtatatctacaatacatatatgaacaccattcttcttctctagccatatttatatgaggataaagtaataaatctctgtgctattcaaggaaaaaaaatgaatgctttaaaaaataaatctttaaagaatagtttcaaaaataaagttcaaatattgcacaaaataatttaactgtaaatattactacatagtgtaaaacaattttaaaaaaatttttacactctacagtaaatcccactttctaattctataaaagaatttattggaagtccacattaaatgtttagatattaaatgcttacattcagtttgatgggaattcaattttcacaagttaactgagactntgtcttaaaagttcatctatttgagttttgt

SEQ ID NO: 2805 - DNA, 357 bp, Homo sapiens
  misc_feature 196, 319, 323, 353: n = A,T,C or G
actcatgcccgactgtctaccaggcacacagactttgaggagagggcgtatgtcgtcttgatccgcatcaatgatgggggtcggccacccttggaaggcattgtttctttaccagttacattctgcagttgtgtggaaggaagttgtttccggccagcaggtcaccagactgggatacccactgtgggcatggcanttggtatactgctgaccacccttctggtgattggtataattttagcagttgtgtttatccgcataaagaaggataaaggcaaagataatgttgaaagtgctcaagcatctgaagtcaaacctntganaagctgaatttgaaaaggaatgtttgaatntata

SEQ ID NO: 2806 - DNA, 348 bp, Homo sapiens
acaatttaatttaaaccagaccaccttaacaagcactatattgaagagaggttacataaataaaagtgaaacgaggcttggatcccttcatgtatgggggaaaggaactactcctgtcaatgcagttactctaacgtataacggaaataaaaattcgcttccttttaatgaagacactaccaacatgatattacgtattgatctgaccacacacaatgttactctagaagaaccaatagaaatcaactggtcatgaagatcaccatcaattttagttgtcaatgggaaaaaacaccaggatttaagtttcacagcacttacaactttccctcttcacttggttcttgt

SEQ ID NO: 2807 - DNA, 466 bp, Homo sapiens
accctctcagctccaggtggctctgaggtgcctgtcccacccccacccccagctcaatggactggaaggggaagggacacacaagaagaagggcaccctagttctacctcaggcagctcaagcagcgaccgccccctcctctagctgtgggggtgagggtcccatgtggtggcacaggcccccttgagtggggttatctctgtgttaggggtatatgatgggggagtagatctttctaggagggagacactggcccctcaaatcgtccagtgaccttcctcatccaccccatccctccccagttcattgcactttgattagcagcggaacaaggagtcagacattttaagatggtggcagtagaggctatggacagggcatgccacgtgggctcatatggggctgggagtagttgtctttcctggcactaacgttgagcccctggaggcactgaagtgcttagtgt

SEQ ID NO: 2808 - DNA, 180 bp, Homo sapiens
  misc_feature 9, 63, 110: n = A,T,C or G
ttccttcanagagtgaatctattgaaccctggggaatatagttgaccaaatgatgggtgtccntctctgagcttcatgttttcagcgaagacatctggtgccacaccagntcttgaatcaagccttgatttaagatcacataaacttgcatgttattttatcaagagcagaccccggtgt

SEQ ID NO: 2809 - DNA, 517 bp, Homo sapiens
  misc_feature 476, 494: n = A,T,C or G
gaggagccattgatgtgtgcttattgtgtaacagaacctggagcaggctctgatgtagctggtataaagaccaaagcagaaaagaaaggagatgagtatattattaacggtcagaagatgtggataaccaacggaggaaaagctaattggtattttttattggcacgttctgatccagatcctaaagctcctgctaataaagcctttactggattcattgtggaagcagataccccaggaattcagattgggagaaaggaattaaacatgggccagcgatgttcagatactagaggaattgtcttcgaagatgtgaaagtgcctaaagaaaatgttttaattggtgacggagctggtttcaaagttgcaatgggagcttttgataaaaccagacctgtagtagctgctggtgctgttggattagcacaaagagctttggatgaagctaccaagtatgccctggaaaggaaaacctntcggaaagctacttgtanagcaccaagcaatatcatttatg

SEQ ID NO: 2810 - DNA, 330 bp, Homo sapiens
  misc_feature 161, 202, 214, 220, 296, 302, 326: n = A,T,C or G
acaatagatgcaacgccaaaatgagatgaaagagaattcagaataaaattccgtcccttggagcatattccattggctttctctgctcctgcttccgctggtatctggccttctggtagaaaatgatgatggttacagtgactatatttagaagaatgacnagcagtatgagccagaacgagtatccgtaactgtgggtcgntcctttactggnggttgncgggtaaagcatttggaacaactcttcggagagttggttggactgcgtgttcgccacaaacagtatcatggtcacnaaaacnaaggatgcaccgagcccgttccangtgt

SEQ ID NO: 2811 - DNA, 119 bp, Homo sapiens
  misc_feature 65, 94: n = A,T,C or G
actcggttaactgccaggtgggtgacagtgatgccaggctcgcccactactgcactggacacagnctcaccaatgccaccttcataataatggncctccacggtgaggatcctgccctt

SEQ ID NO: 2812 - DNA, 66 bp, Homo sapiens
actgggacaggttaaaaaatacagttgtagccctcaggatatttaatatccagtgaaaagtgacag

SEQ ID NO: 2813 - DNA, 516 bp, Homo sapiens
acctctgctatttgctgttattttatctgctatgctattgaagttttggcaattgactatagtgtgagccaggaatcactggctgttaatctttcaaagtgtcttgaattgtaggtgactattatatttccaagaaatattccttaagatattaactgagaaggctgtggatttaatgtggaaatgatgtttcataagaattctgttgatggaaatacactgttatcttcacttttataagaaataggaaatattttaatgtttcttggggaatatgttagagaatttccttactcttgattgtgggatactatttaattatttcactttagaaagctgagtgtttcacaccttatctatgtagaatatatttccttattcagaatttctaaaagtttaagttctatgagggctaatatcttatcttcctataattttagacattctttatctttttagtatggcaaactgccatcatttacttttaaactttgattttatatgctatttattaag

SEQ ID NO: 2814 - DNA, 345 bp, Homo sapiens
  misc_feature 305, 306, 319: n = A,T,C or G
acaattcatagggacgaccaatgaggacagggaatgaacccggctctcccccagccctgatttttgctacatatggggtcccttttcattctttgcaaaaacactgggctttctgagaacacggacggttcttagcacaatttgtgaaatctgtgtagaaccgggctttgcaggggagataattttcctcctctggaggaaaggtggtgattgacaggcagggagacagtgacaaggctagagaaagccacgctcggccttctctgaaccaggatggaacggcagacccctgaaacgaagcttgnncccttccaatcanccacttctgagaacccccatctaact

SEQ ID NO: 2815 - DNA, 266 bp, Homo sapiens
  misc_feature 87, 121, 166, 203, 208, 241, 243, 251, 261: n = A,T,C or G
agaaaatactaattaataatagtaagttgttagtgttggttaagttgttgcttggaagtgagaagttgcttagaaactttccaaagngcttagaactttaagtgcaaacagacaaactaanaaacaaaaattgttttgctttgctacaaggtggggaagactgaanaagtgttaactgaaaacaggtgacacagagtcaccanttttncgagaaccaaagggaggggtgtgtgatgccatntnacaggcangggaaatgtncttta

SEQ ID NO: 2816 - DNA, 395 bp, Homo sapiens
  misc_feature 358: n = A,T,C or G
acaaccaccatgacaactgccgggagggccacgcaggtcgtggtcacctgccagcgactgtctcagactgggcagggaggctttggcatgacttaagaggaagggcagtcttgggcccgctatgcaggtcctggcaaacctggctgccctgtctccatccctgtccctcagggtagcaccatggcaggactgggggaactggagtgtccttgctgtatccctgttgtgaggttccttccaggggctggcactgaagcaagggtgctggggccccatggccttcagccctggctgagcaactgggctgtagggcagggccacttcctgaggtcaggtcttggtaggtgcctgcatctgnctgccttctggctgacaatcctggaaatctgttctcc

SEQ ID NO: 2817 - DNA, 531 bp, Homo sapiens; identical to SEQ ID NO: 2504

SEQ ID NO: 2818 - DNA, 480 bp, Homo sapiens
  misc_feature 390: n = A,T,C or G
acaaactaaaattatgggagaggaaactatgagtgaaacgatgagaaaaacctaatgcatgatgtagaactgagtggtgttaatagcagagcactggagggaagggccacaaaactcttcaccccaaggtctagaatcattctagaatcatcctacaagcctagttttcatgagattcagccctattttatttcttgctcttggaattatatgaaattacgaatttctgtgtgttgccagctgtaatagaataccctggaattttatttacttttaattttgtttatttatttatgcttatgtgccatcttctcatgaaaaagaggcagtatgttaaaagtttgagttcagattttctgatgtagataaataagctaaagaaggcagggntgaagtgtgatatatgagaatttccagagcagggtattcgtaacttgtaagtatttagtccaagttccctctcccaacacattttacact

SEQ ID NO: 2819 - DNA, 339 bp, Homo sapiens
  misc_feature 97, 128, 137, 150, 178, 183: n = A,T,C or G
gtacaagctttttttttttttttttttttttttgaaaatgagtcagttgattttattcattaaaaatatgcataataaaaggccaagcacaaagctntttataaaaaggagcaaaatgtattttccanaagagttanataaaggcatganatgaatttcagttaaatggatctatttntttgngggttttgagaactcattttaaacactgaatagaggctgttttacattataatcatagctagagattacatagatggagggaaaaaaagtcttttgctttaactcttactaaatttctataaagtattttaaaatcaatttaaaaaccaaatctgt

SEQ ID NO: 2820 - DNA, 105 bp, Homo sapiens
gccgctattaaaggttcgtttgttcaacgattaaagtcctacgtgatctgagttcagaccggagtaatccaggtcggtttctatctacttcaaattcctccctgt

SEQ ID NO: 2821 - DNA, 279 bp, Homo sapiens
  misc_feature 64, 176, 200, 212, 245, 249, 274: n = A,T,C or G
accttcattgcgatcaaaccagatggggtccagcggggtcttgtgggagagattatcaagcgtnttgagcagaaaggattccgccttgttggtctgaaattcatgcaagcttccgaagatcttctcaaggaacactacgttgacctgaaggaccgtccattctttgccggcctggngaaatacatgcactcagggccggnagttgccatggnctgggaggggctgaatgtggtgaagacgggccnagtnatgctcggggagaccaaccctgcanactgc

SEQ ID NO: 2822 - DNA, 87 bp, Homo sapiens
  misc_feature 72, 79: n = A,T,C or G
acaagctttttttttttttttttttttttttttttttttttttttttttttttttttttttttttttttttnggttttnggaaaaaa

SEQ ID NO: 2823 - DNA, 421 bp, Homo sapiens
ctggaagacaattcagctttggataaaatgctgcagaatgtccagatgccctccaaaaaactggacttcattattttgaatgaaacaaaattttggtatcagatgatcttgcctcctcattttgataaatccaagaaatatcctctactattagatgtgtatgcaggcccatgtagtcaaaaagcagacactgtcttcagactgaactgggccacttaccttgcaagcacagaaaacattatagtagccagctttgatggcagaggaagtggttaccaaggagataagatcatgcatgcaatcaacagaagactgggaacatttgaagttgaagatcaaattgaagcagccagacaattttcaaaaatgggatttgtggacaacaaacgaattgcaatttggggctggtcatatggagggt

SEQ ID NO: 2824 - DNA, 465 bp, Homo sapiens
  misc_feature 79, 102, 152, 159, 245, 304, 318, 341, 353: n = A,T,C or G
tttttttttttttcacagtccctgctttatttccatttgttcacacacgctttaaaaaaaaaaaaaaaaaacacatgcnctcacacaatacccaaacatcanaattagaagggcataaaacagggggctttataggctgaaaaatatcctanacttcanaacagaataccaatcaaatattgaaaattcctttgttcaaaacacaaagatgttttgtttttaatggaagtttttttaaagttttntttttttaaaaaaaaaaaaagaaagttaaggacaaacggcaaactcacactgcctgacncagggcctggtttnttttccttgaaggccttttacanatgtcagctttnactggcctccatgcacaacctcccactaccacccaatctgcctgccacagcaaagtgcaggcaccctgggccccctggaggatgcgggcaggggctacagggcatccaggat

SEQ ID NO: 2825 - DNA, 124 bp, Homo sapiens; identical to SEQ ID NO: 2119

SEQ ID NO: 2826 - DNA, 531 bp, Homo sapiens; identical to SEQ ID NO: 2504

SEQ ID NO: 2827 - DNA, 358 bp, Homo sapiens
  misc_feature 29, 111, 317: n = A,T,C or G
actttattttttgagttcttattaatgangaacatccacttttgcattgacagtgatttcaagattgctttatcagcctttaaaggattcttgactagtcgtgcacatcanaactgccaggtccccagtggttctgaagcagtaagctttgggtgggctctggcatcagcactttcactaagcttcacagataattctgatgcatactccaggcctgaaccactgatcaatttgaaacatgcataacaaagcaaaaaaagttttgtttcaccttttgaaatacagttaactcttttaccatgccagagatcattcanagagacaggtcgttgctccggagtgatacagatctggcagt

SEQ ID NO: 2828 - DNA, 219 bp, Homo sapiens
  misc_feature 46, 97, 190: n = A,T,C or G
acaagcttttttttttttttttttttttttcttttttttttttttnaaaaaaattatatactttattacaaatggtaaactcaaagtgctccaaatntcttatttacaaacaacactgggcaggatacccaaacaaacaaacaagaaataacttacaaaggcatgaagctgtttattgacagtaatcagntttcatcaaattaaaaaatatatatatgt

SEQ ID NO: 2829 - DNA, 336 bp, Homo sapiens
  misc_feature 290: n = A,T,C or G
tttttttatagttaaaaataggaaagatttaattaaagcaacagatagttcagacccattgaaaccctatcaagacttcattatagatgtaagtatatgctaggcttggtcagaaatatgaagtatcgtcacgaatttagaattaatttattaaaactaagatctacaaatctgtgaattttacttattttaaatgaaaaaatttatgttgagtatttaaattttaggataagattgtaagtgtatgttttcatgtgtgacgaaactaaatgtttgattttgacacgtantctagggaacctgatgcaactactcgtgtatgtgaactactgaagt

SEQ ID NO: 2830 - DNA, 205 bp, Homo sapiens; identical to SEQ ID NO: 2127

SEQ ID NO: 2831 - DNA, 247 bp, Homo sapiens
  misc_feature 33, 83, 135, 172, 220: n = A,T,C or G
acagggtattaaacaaataccaaggggaacagntaacttcaatacaaggtcaaaatcagcaacaagttctacaatccagtgcntgatatcagatacaagcttcaaggacaatttcttttcgaaggcttattccantttcgtgaggctagcatgaggtgtgtgcatttgccangggcaaatttctattctcaattaacccatgcagcaaatgctacgcatntgctgagtccgtttagaagcatttgcg

SEQ ID NO: 2832 - DNA, 374 bp, Homo sapiens
gccaaaagtgtgcatttggctacagtggactcgactgtaaggacaaatttcagctgatcctcactattgtgggcaccatcgctggcattgtcattctcagcatgataattgcattgattgtcacagcaagatcaaataacaaaacgaagcatattgaagaagagaacttgattgacgaagactttcaaagtctaaaactgcggtcgacaggcttcaccaatcttggagcagaagggagcgtctttcctaaggtcaggataacggcctccagagacagccagatgcaaaatccctattcaagccacagcagcatgccccgccctgactattagaatcataagaatgtggaacccgccatggcccccaaccaatgt

SEQ ID NO: 2833 - DNA, 130 bp, Homo sapiens
  misc_feature 42, 117, 122: n = A,T,C or G
accattggtggccaattgatttgatggtaagggagggatcgntgacctcgtctgttatgtaaaggatgcgtagggatgggagggcgatgaggactaggatgatggcgggcaggatanttcanacggtttc

SEQ ID NO: 2834 - DNA, 531 bp, Homo sapiens
acctctgctatttgctgttattttatctgctatgctattgaagttttggcaattgactatagtgtgagccaggaatcactggctgttaatctttcaaagtgtcttgaattgtaggtgactattatatttccaagaaatattccttaagatattaactgagaaggctgtggatttaatgtggaaatgatgtttcataagaattctgttgatggaaatacactgttatcttcacttttataagaaataggaaatattttaatgtttcttggggaatatgttagagaatttccttactcttgattgtgggatactatttaattatttcactttagaaagctgagtgtttcacaccttatctatgtagaatatatttccttattcagaatttctaaaagtttaagttctatgagggctaatatcttatcttcctataattttagacattctttatccttttagtatggcaaactgccatcatttacttttaaactttgattttatatgctatttattaagtattttattaggagt

SEQ ID NO: 2835 - DNA, 407 bp, Homo sapiens
accgatcgtagcccctatgagaaggtttctgcaggtaatggtggcagcagcctctcttacacaaacccagcagtggcagccacttctgccaacttgtaggggcacgtcgcccgctgagctgagtggccagccagtgccattccactccactcaggttcttcagggccagagcccctgcaccctgtttgggctggtgagctgggagttcaggtgggctgctcacagcctccttcagaggccccaccaatttctcggacacttctcagtgtgtggaagctcatgtgggcccctgagggctcatgcctgggaagtgttgtggtgggggctcccaggaggactggcccagagagccctgagatagcggggatcctgaactggactgaataaaacgtggtctcccaaaaaaa

SEQ ID NO: 2836 - DNA, 72 bp, Homo sapiens
accaggaggtgtttgggcggctgcgagatgagaacggacgaccctactcgcccagtcagtatgcgctccagt

SEQ ID NO: 2837 - DNA, 463 bp, Homo sapiens
acaaaattcttaatttaagagattgtatgtaatatttatttcattaatttctttccttgtttacgtaaattttgaaagattgcatgatttcttggcagaaatcgatcttgatgctgtggaagtagtttgaggaacatcctatgagttttcttagaatgtataaaggttgtagcccatccaacttcaaagaaaaaaatgaccacatactttgcaatcaggctgaaatgtggcatgcttttctaattccaactttataaactagtaaaaaagtgtttgcttattccaccagttctactgtgacatactcgagtataaagacatgtagcaataacggggagtggggggggagtctcacagtgcctttggaagggcccgaacttgccttaaatcttcctcaaccaaataagtattttattagtgcttgagagaatctgaatgtaggatgggttcaactgcacaaaag

SEQ ID NO: 2838 - DNA, 275 bp, Homo sapiens
  misc_feature 162, 247: n = A,T,C or G
acaggcaggatcttgccaccttgcccaggctggtcttgaactcctgagctcatgccatctgcctgccttagtctcccaaaatgctgggattacaggagtgagccaccatgcccggctggcagttgcatggaagagaacacctctttatggcttaccctctanaatttctaatttatgtgttctgttgaaatttttgtttttttacctttattgaaacaacaaaaagtcagtattgaaacatatcttnctgttttctgttgtcaaatgatgataat

SEQ ID NO: 2839 - DNA, 604 bp, Homo sapiens
  misc_feature 446: n = A,T,C or G
actctgattcacagaaaagcagtgtaagtagtaaaacaaaaatattgctttcacttagtgcgtaggttttaccggggatttaatcctcatgtgaagatttaatttgtcatgtgacccattaacatatatgtatgtaagccctgaactgtgtatttagaaagcaattttagtaaattgaactattttttagaccatacaggcaaaatcttacttcagtggcaaagcacacacataggtatactccaacgtgtagcactggggcaaacttcagacatggaacattaggcaccaagttcacaatcacactaaacatagttcacaatccttcaatccatactcttcagtggaggatgaggccttatttaacagttaactgggacagacagatgaagttttaaaatctaattcttggcctaactgtggagtggggctgactcagccttcanaactgtgaagtggatgccttaacagggccaagatctatcagcctcttaaactgactttcatttctctggttcagagaaaaaagcttatggtatcttcacgttggatgaacttgcatatcgtgagagtcctcagctccaatttcgtgtctaggcacatc

SEQ ID NO: 2840 - DNA, 253 bp, Homo sapiens
acatgcgactgagacagctcaagaggttcagacgagctgatgaagtaaagagtatgtttagttccaatcgtcagaaaattttggaaagaacggaaatcttaaaccaagaatggaaacagcgaaggatacagcctgtgcacatcctgacttctgtgagctcattgcgcgggactagggagtgttcggtgaccagtgacttggattttccaacacaagtcatcccattaaagactctgaatgcagttgcttcagt

SEQ ID NO: 2841 - DNA, 200 bp, Homo sapiens
cctttttaaaaatagacactccccgaagtcttttgttcgcatggtcacacactgatgcttagatgttccagtaatctaatatggccacagtagtcttgatgaccaaagtccttttttccatctttagaaaactacatgggaacaaacagatcgaacagttttgaagctactgtgtgtgtgaatgaacactcttgctttat

SEQ ID NO: 2842 - DNA, 461 bp, Homo sapiens
actggaatttttttgttcgtttgtttttaagacggagtgtcaactctcgcccaggctggggtgcagtggcctgatctcggctcactgcaaccttctcctcccaggctgaagtgattctcctgcctcagcctcgcaagtagctgggactgcaggcatgtgccaccactcctggctaattatttgtatttttagtagagagagggtttcaccgtgttagccatgatggtctcattctcctgaccttgtgatccacccacctcggcctcccaaagtgctgggattacaggcgtgagccactgtgcccaccctggtatttttttttaaattggccacttaagagttgtccttcagaaagtggagcagcagtgtgattagtaaaaacgatgggctttcctgcagctctggcttatggtctttgtttttccagttaacagctgttacttcatgctgttatagggggt

SEQ ID NO: 2843 - DNA, 527 bp, Homo sapiens
  misc_feature 417: n = A,T,C or G
actttgtatttggccaaagcatcttctaggggctttcgaaattgtttagaaactgtattgaaactcggaaactgaatctgagcgaattgacaagtattaaggaggaacaaaacaatatctttccgaagccataatatctggaaggaaggaagctaaaacttgttagataaatcagactttcctacaaaagaggggtttggatagatgatctgaagaattcaggttatagcccagacaggttgcacactgaaattctaattcatttgagccttaattagaggtttatggacacattatttttagatttgttgtattttattttcaaaatgaaaacaaactgaggaaataacataaacgtttactacttcataatttactcttactcctgtttggtaagttttatattattgtttcttnaattgctaaagtaagggggaaatgaaattattgtttatcatattttgacttttcaattaagcattttttcctttctatacactttgatttttatcatttctccttacatt

SEQ ID NO: 2844 - DNA, 153 bp, Homo sapiens
  misc_feature 125, 140: n = A,T,C or G
tcctccccctgggatgcgaggccttctttgacccttggccacagagtatggaagtagctccgcagaggcgtgggctcgattcctcagggccacgttaccacagacctgtttgtttcttatgctgntgttcgtggagtctnatgggattgtctg

SEQ ID NO: 2845 - DNA, 226 bp, Homo sapiens
  misc_feature 222: n = A,T,C or G
ttaaaaggaaagtgcagcttcaagatattgtgtaaatactgagccaagacatttctggagctgtgctctgtctccaaaaacctcaatgcctttagggcttttctcagtggtccagctagccttctctttggaggaggatgaagccgcattgcacattctctgcttcctgtcgtagcctctgttgtcaatggaaatgcggaagcccatctggtgcccgtcagngaga

SEQ ID NO: 2846 - DNA, 417 bp, Homo sapiens
acatgatacagattggttttgcagtttttaatgaactgaaatagaaatgtctaaatacagcagtatctgcctgtgcaacaaatatctgtaaggtaaaataaggtatttgatagaagaacatctgcaagaacaaatcagatgaaaaatctgaaaaggtttctatataccttctggattttaaaaaaacccaaaaattaatggctcaagatactacattgctaaagttaggggaaaaaagtaaaaaggctgtgagttctgttgcaagagctcatttgtagacttgcaaaatctaactaattttatattatgcttgttgttagagcagtgctcaaaattacagaagcttcaaattgttatgttttcacaaaatttgctacatatgttgacatgaatgtgtgtcagggaattcatacctgc

SEQ ID NO: 2847 - DNA, 498 bp, Homo sapiens
cctgtgctggcaaccagtggcctagaccatgatgtgaagatctgggcacccacagctgaagcttccactgagctgacagggttaaaagatgtgattaagaagaacaagcgggagcgggatgaagatagcttgcaccaaactgacctgtttgatagtcacatgctgtggttccttatgcatcacctgagacagagacgccatcaccggcgctggcgagaacctggggttggggccacagacgcggactctaatgagtctcccagctcctcagacacatcggacgaggaggagggccctgaccgggtgcagtgcatgccatcttgaggcctcatacctaggtggggcaggctggggctgccaacctgatcctgcctgggcaaccctttcctgtcccaggccctacattcagcagaaacgcactttggactttttgctttagataaaagaaagacatcccaggagaaggacaaaccagaggagtgaaccaacaaagagtac

SEQ ID NO: 2848 - DNA, 287 bp, Homo sapiens
gtacctgatcaagctggaggaggaggatgaggacgaggaggatggggagagcggctgcaccttcctggtggggctcattcagaagcaccgacggcggcagaggaagatgggcgaggacatgcacaccatcggctttggcatctatgaggttccagaggagttaagtgggcagaccaacatccacctcagcaaaaacttcttcctgacgaatcgcgccagggagcgctcagacaccttcatcaacctccgggaggtgctcaaccgcttcaagctgccgccaggagagt

SEQ ID NO: 2849 - DNA, 389 bp, Homo sapiens
accgcggccgttaaacatgtgtcactgggcaggcggtgcctctaatactggtgatgctagaggtgatgtttttggtaaacaggcggggtaagatttgccgagttccttttactttttttaacctttccttatgagcatgcctgtgttgggttgacagtgagggtaataatgacttgttggttgattgtagatattgggctgttaattgtcagttcagtgttttaatctgacgcaggcttatgcggaggagaatgttttcatgttacttatactaacattagttcttctatagggtgatagattggtccaattgggtatgaggagttcagttatatgtttgggattttttaggtagtgggtgttgagcttgaacgctttcttaattggtg

SEQ ID NO: 2850 - DNA, 227 bp, Homo sapiens
acgtcctagcattgaatgcatggcatgtcccatttcatggaaaagattttccatcatgccaggagttagcaaagttggagaactccttgaggaacggggaagattcagcataagaactacaactgggagttgatagtctccatcttcctttagtctgcctccacggatagtgaaatggcaatcctgatgtggtttgtctgctcgctgaaaaaaatcacagtaaatgt

SEQ ID NO: 2851 - DNA, 383 bp, Homo sapiens
  misc_feature 344, 352, 364: n = A,T,C or G
acagaattaaaaaagttcaaacaataattgtttggaaccacaaataattaaaaggaaacacagcaatcccataaacaagcattctggcatctgttagaaattttccctcaaattatgaaatgtagctctccatgctttccaatgattgttataatacccacaaatatctgtgatttcagtggaatactttaacaaaagttttctttttaaggcatgatcctgattcattttttcttcaatatctcagtcatttcaggaactaccttaaataaatctgcaactattccataatctgccacttggaaaattggagcttctgggtctttattaattgccacaattgncttgctgnctttcatcccanctaaatgttggatggctcc

SEQ ID NO: 2852 - DNA, 271 bp, Homo sapiens
  misc_feature 110: n = A,T,C or G
ctttttttttttttttttttttttgctttaaggtttttattgaatttatttggacaaatccgtccaactataaacttataaccccagctgtggtctctgagagactgaanattcgaggctccctggccagggcagcccttcaggagctccttagtaaaggacttatcaaactggtttcaaagcacagagctcaagtaatttacaccagaaataccaagggtggagatgctccagctgctggtgaaatgcatgaataggtccaaccagctgt

SEQ ID NO: 2853 - DNA, 240 bp, Homo sapiens
  misc_feature 68, 111: n = A,T,C or G
acttttctatcttaaaaaaatcagtgaggatatttatttaatgaacatcaattccttttaaattttcntagagaaatttctctgtggctcagttttaccacccataaagcngagacagtaatttatggttatcctttctgacccacaaagtatgaaaagttctgtaatctgtaaactcagttctgtaatctgtattattgagatgattaatataaagttgtattttcactgaaatgattg

SEQ ID NO: 2854 - DNA, 386 bp, Homo sapiens
  misc_feature 242, 244, 245, 374: n = A,T,C or G
actttgtagagcagagagaggctttggttcctcctttcttcaatcacgtggagatgtgtcatcacctgggatttcatctgggccgccttttctgggtcaacagccaacacatgctggtaatgacggatggtatgtaagcgatctttgttctcagcacggacataacgccgtaaggcctggagaatgcgatgaggccgtggcgggtcagactgcaaggcagccaggtagttctccagagccanannacggcggtcattcagcatagcttccactcgggccaggtgggtctccaccagctgctgcttctcactggctgcttccttctctaaagctttaaccatggcttggaagtgctgaatcagagtctgcctctntgctttggggag

SEQ ID NO: 2855 - DNA, 185 bp, Homo sapiens
  misc_feature 161, 178: n = A,T,C or G
acggccagggctattggttgaatgagtaggctgatggtttcgataataactagtatggggataaggggtgtaggtgtgccttgtggtaagaagtgggctagggcatttttaatcttagagcgaaagcctataatcactgcgcccgctcataaggggatggncatggctaggtttatanatagttg

SEQ ID NO: 2856 - DNA, 127 bp, Homo sapiens
acaaacccgtagtgctgatgaaccaatgacaacatttgttgtctgtaatgaatgtggaaatcgatggaagttctgttgagttggaagaattggcaaaatatctggaccattaagaaaacggattttg

SEQ ID NO: 2857 - DNA, 258 bp, Homo sapiens
  misc_feature 243: n = A,T,C or G
gtttggccttagtcaatatctatgcccgtcacataacagccgaggcaccgaggcccacagagaagcagctgggagcttggaaacctggtctcttgaatttcaaacctggtttcttacaggtggttgcctggggtgggtggagtggcgacaggatagagctgaaggactatgcaaatgaggaagtaagtcagggcgggctttgagaaggggacccatatcctacaggcaaaaagcaggctaggngaccttgggacacta

SEQ ID NO: 2858 - DNA, 477 bp, Homo sapiens
acagcattctggaataaagcaagagtgttcattcacacacacagtagcttcaaaactgttcgatctgtttgttcccatgtagttttctaaagatggaaaaaaaggactttggtcatcaagactactgtggccatattagattactggaacatctaagcatcagtgtgtgaccatgcgaacaaaagacttcggggagtgtctatttttaaaaaggtttatgtgtgtcgaggcagttgtaaaagatttactgcagaatcaagcccacttttaggcttaggaccaggttctaactatctaaaaatattgactgataacaaaaagtgttctaaatgtggctattctgatccatagttgttttttaaagaaaaaaaatgtatatacagaaagagtataaaagtttgtgaatttaatgcaaattagcttccagtcttcacttcccaaatacttgatttatagttttgactcctttacattttt

SEQ ID NO: 2859 - DNA, 282 bp, Homo sapiens
  misc_feature 240, 251, 258, 274: n = A,T,C or G
actgtaaaagttctgacacaagacagtggcagtggttacttttcatcgactttagcatgtgatctcagggactcagacatacgtctaagttctattctgagttttggcaacagagcagtgacagatatttctgaatgaacaatttttaggtgttttcagccatttgaaaagtattgccaacacactatttggtgttagctcaacagtcacgttgtgccaagaattaaagaactctaaagnctacaaacatnttacttnaccaagactaactatnatgaaggg

SEQ ID NO: 2860 - DNA, 267 bp, Homo sapiens
  misc_feature 196, 259, 266: n = A,T,C or G
gtacaagcttttttttttttttttttttttttttaacaggaaaacatttaaaatttattgacaacagaaatattttatagcccaacctggtatgcaaaaatgctggctatgtcccactgagttgatttcatggctcactaatgaaatgtgagccacagagggacaattacattgcagggtattaaatggcctgganaatcaccagaaaagaacactcttgcctgtgcttccacaaactgggtggtcaagtgggctgatngttccana

SEQ ID NO: 2861 - DNA, 268 bp, Homo sapiens
  misc_feature 259, 260, 264: n = A,T,C or G
ccggacactgatgtcatcctcatgtgcttctccatcgacagccctgacagcctggaaaacattcctgagaagtggaccccagaggtgaagcacttctgccccaacgtgcccatcatcctggtggggaataagaaggacctgaggcaagacgagcacaccaggagagagctggccaagatgaagcaggagcccgttcggtctgaggaaggccgggacatggcgaaccggatcagtgcctttggctaccttgagtgctcanncaanacca

SEQ ID NO: 2862 - DNA, 461 bp, Homo sapiens
acattatcaagtagatttgtcttattttaaaagcgtatgaaggtcaatttaaaatgcactaccccttttttccaacacggagcttaaaacaaattaatgaaagagtggaaaattcaaaataagggcaagagataagctttttttctttttttcctttaagatagactcaggataggtagatagctttcactgatgtagatgtggaataaattattacttcaggaaaaaaattcccaaacatcttatgaaaaagtatacaactctacttcaaaatatgctatttactcactgccaaagacagttttatttgaaatcttgtttctgtatttaaaccctaattagccaccaaaaaaggttagtgcataataacctttcaaagttaaacaaaagccacaaaaattttgccacaaggcttaaaggattatctatttcaaatgctcatttccagatgtaactataag

SEQ ID NO: 2863 - DNA, 462 bp, Homo sapiens
acatgatacagattggttttgcagtttttaatgaactgaaatagaaatgtctaaatacagcagtatctgcctgtgcaacaaatatctgtaaggtaaaataaggtatttgatagaagaacatctgcaagaacaaatcagatgaaaaatctgaaaaggtttctatataccttccggattttaaaaaaacccaaaaattaatggctcaagatactacattgctaaagttaggggaaaaaagtaaaaaggctgtgagttctgttgcaagagctcatttgtagacttgcaaaatctaactaattttatattatgcttgttgttagagcagtgctcaaaattacagaagcttcaaattgttatgttttcacaaaatttgctacatatgttgacatgaatgtgtgtcagggaattcatacccaggtaaatgacaattacatcagtatagctaatttttgccaccttggg

SEQ ID NO: 2864 - DNA, 220 bp, Homo sapiens
actttaatagtttttcttagaaaaaaaaatttccagacacttaacatttcacaacatttcaacagcaaagtattagttgagagaggggttttcaggagttggagattatagaatattaggaagaaatgttggtatcctccattatagatggatggcataggtcacaaatgggagactggcagctaagccaatatcaaaacccagtggaatgacacttcta

SEQ ID NO: 2865 - DNA, 277 bp, Homo sapiens
actagaactactttaagtatgctgtgctttcttttcaagtgaggtatctatattgaggaaaaaaatcttataaattccttttacattaaactaatttaatacactattttgttttctgggctgaatttttaaatttttttcttacatttgatcactttctaattcaaaaattgtagcactacataggacatttaattctattactaaataggctccaaattacattatacagtttagaaaccatttcaatgaatggatttacaaaaaaaaaaaaaaa

SEQ ID NO: 2866 - DNA, 272 bp, Homo sapiens
acaaagcagcaactgcaatactcaaggttaaaacattagaaaagcatttgtgtgacaggtatattacagtattatcaaaatattacattttcagacttacttagcagataatcatccaccagagcttaaatctttaaattatttccatagtcttaaaaaatatgtaatgtcagaatgcatataaaaagaatgtaaaaggaaacctaaaatacaaatggaataatgtaacaaataaatatttgatttcagtaactgttaataatcagctcaac

SEQ ID NO: 2867 - DNA, 226 bp, Homo sapiens
  misc_feature 204, 217: n = A,T,C or G
acacaggaggcaaagtgtttcacatcatagacttcacttccaactccttggaatgttcatttctttggcttacaggagagactagacaggaaggccaggcaatgcttaggcaactaaaatgaggttgggggtaatgctaacgtcaccctcacagggatggccacggggactgttattcgcaagctggttttctagacctgttanctggaagcatggngagcaccat

SEQ ID NO: 2868 - DNA, 99 bp, Homo sapiens
  misc_feature 86, 87: n = A,T,C or G
gcgattgtgtgtggcctgagactgggtggttccaaaggaggcggggctagtgcaggcagcattattggggtgtgtgggtgagaagnncttgctcccatg

SEQ ID NO: 2869 - DNA, 439 bp, Homo sapiens
  misc_feature 343: n = A,T,C or G
ttttagtgaagttaaacaaacattgggataccgacacagacaacttgagacagtttttttaatcttttaatcagtgtagctatgtgctgctgctgctcaagagctggatccatacaggttgtgtgtcatctgtcctcttgaggttcaggagattctaaattgaatattccacggtttgggacagcatccggaagttttccctatgactttatattttgtattatgtcaaatgttacggcagggcccaaatagcatagccacaagtttggtttatgtgggcataaaattctaaccaaaccccagacatagggagtcatttggagaaagcctgtatgtggtgttntaacctaataaagttgatgagagagaaggggagaggaagcgaacataaagcgggtcaagtgtagtgcatcttttgtatctcaggcgtggcttcttc

SEQ ID NO: 2870 - DNA, 174 bp, Homo sapiens
acaatagatgcaacgccaaaatgagatgaaagagaattcagaataaaattccgtcccttggagcatattccattggctttctctgctcctgcttccgctggtatctggccttctggtagaaaatgatgatggttacagtgactatatttagaagaatggcgagcagtatgagcc

SEQ ID NO: 2871 - DNA, 491 bp, Homo sapiens
acgatgtctagtgatgagtttgctaatacaatgccagtcaggccacctacggtgaaaagaaagatgaatcctagggctcagagcactgcagcagatcatttcatattgcttccgtggagtgtggcgagtcagctaaatactttgacgccggtggggatagcgatgattatggtagcggaggtgaaatatgctcgtgtgtctacgtctattcctactgtaaatatatggtgtgctcacacgataaaccctaggaagccaattgatatcatagctcagaccatacctatgtatccaaatggttctttttttccggagtagtaagttacaatatgggagattattccgaagcctggtaggataagaatataaacttcagggtgaccgaaaaatcagaataggtgttggtatagaatggggtctcctcctccggcggggtcgaagaaggtggtgttgaggttgcggtctgttagtagtatagtgatgccagcagc

SEQ ID NO: 2872 - DNA, 250 bp, Homo sapiens
cggagagcgtagtgaccatcatgagcctcctcaacaagcccaagagtgagatgaccccagaggagctgcagaagcgagaggaggaggaatttaacaccggtccactctctgtgctcacacagtcagtcaagaacaatacccaagtgctcatcaactgccgcaacaataagaaactcctgggccgcgtgaaggccttcgataggcactgcaacatggtgctggagaacgtgaaggagatgtggactgaggt

SEQ ID NO: 2873 - DNA, 473 bp, Homo sapiens
acaaagcagcaactgcaatactcaaggttaaaacattagaaaagcatttgtgtgacaggtatattacagtattatcaaaatattacattttcagacttacttagcagataatcatccaccagagcttaaatctttaaattatttccatagtcttaaaaaatatgtaatgtcagaatgcatataaaaagaatgtaaaaggaaacctaaaatacaaatggaataatgtaacaaataaatatttgatttcagtaactgttaataatcagctcaacaccaccattctctctaaactcaatttaattcttataggaataatgaactgtcaaatgccatggcataattatttatttccaagctatcatcaatgattagaactaaaaaaaatttggcataaaaaaatcacaattcagcataaataaagctatttttagcttcaacactagctagcatctctaagaattgttgaaataagt

SEQ ID NO: 2874 - DNA, 300 bp, Homo sapiens
  misc_feature 273: n = A,T,C or G
gaattctcttatccaacatcaacatcttggtcagatttgaactcttcaatctcttgcactcaaagcttgttaagatagttaagcgtgcataagttaacttccaatttacatactctgcttagaatttgggggaaaatttagaaatataattgacaggattattggaaatttgttataatgaatgaaacattttgtcatataagattcatatttacttcttatacatttgataaagtaaggcatggttgtggttaatctggtttatttttgttncacaagttaaataaatcataaaacttg

SEQ ID NO: 2875 - DNA, 425 bp, Homo sapiens
actgcaaataaatatacacacacactgaagtgatctctccctaaagcatccttgtgctcaggccagatttccctgctggcggctgctcccagtgccggctatagagaaggtggggactgtccctgcaagtgggagttcaggacacacgccccttcagtagcaaaaacagccctggccatcctggcgctcagagccctctgcacacctttgaacgggctgtgtgtcccttctctgatggcagaaagacaacaccagcagaaagacggctgaacaactgcagatcctcctacccccgaagcctggtctgtctcacacatacaagttagagctgggtggacgggtgcttgcactttctggctttggtgggcgagaccttggcctgagaactttggttcacaggaagcttcccttgacaatacttgagt

SEQ ID NO: 2876 - DNA, 347 bp, Homo sapiens
  misc_feature 300: n = A,T,C or G
acaggcattggcacattttaaaaacaaactacataaacagatctttcctataacctaggaaagtggaatgtcagaagtcaacaaaatgtgataaacttaaagtgctaaaacagaaggcacttcacaaaatctgttcactgaaacagttatatatcctcgtttacatccttcactttacaagtggcagtgaacgtctgtttggatagaaggacatacagaaatacaggcagtttagtggcagtaaaaatataagacaagtaatgagtccttggccaacttgtttttgatgacctgtagtgncctttaactttcctccttaagaagaaaaaacagaaggattcacaatt

SEQ ID NO: 2877 - DNA, 529 bp, Homo sapiens
acattaagactaaagttatggatcgttcctgtttggcatagaaatgtgatgactattaacagaaaggggaaaaagatttgccccctatccatcatcagatagacagacttctcttactaaaccccttatgtggagtgggatgagtgactatttcctgcagaaagatcatgcaacttaaagcaaaaaaacaaaccaaccaacaaaaaaaacaaaaacaaaaacaaacttgtgcatattacacatgactgattattgggtgtgcctggcaagactaaatgctgattcgttttcagcgtttgaattaaaagaattccatatacagcagatagataacagtaacaaatattgaactaaaattgctggcaacattatatattaaggttccatcataaactcctcattattctctatgtattctgttacagcttctagcatgcttcatcgtgacaacctaatattatcaagcctcatattttcacaggattatatacttattagatgtttgtttctagaaatatactacatatgt

SEQ ID NO: 2878 - DNA, 296 bp, Homo sapiens
ttattttaataatgtttcaaacatatataacaatgctgtattttaaaagaatgattatgaattacatttgtataaaataatttttatatttgaaatattgactttttatggcactagtatttctatgaaatattatgttaaaactgggacaggggagaacctagggtgatattaaccaggggccatgaatcaccttttggtctggagggaagccttggggctgatgcagttgttgcccacagctgtatgattcccagccagcacagcctcttagatgcagttctgaagaagatggt

SEQ ID NO: 2879 - DNA, 236 bp, Homo sapiens
  misc_feature 53, 165: n = A,T,C or G
acaagcttttttttttttttttttttttttttttattttttttttggctctanagggggtagagggggtgctatagggtaaatacgggccctatttcaaagatttttaggggaattaattctaggacgatgggcatgaaactgtggtttgctccacagatttcanagcattgaccgtagtatacccccggtcgtgtagcggtgaaagtggtttggtttaaacgtccgggaattgca

SEQ ID NO: 2880 - DNA, 479 bp, Homo sapiens
acatgataaattataatacgtatatggttgaagttattttattttttactaatgaattattttaatattccttattgaataaatgctgtaacttgtttgctatggaacttattcttaaagttctagttaaaaataatttttccacatgcatgaaaatatgtattaatcagaggtggcttaattacattgaaattgcttttttgttgttgtttttttactgaaataactcatgtttgtgtagaagaatgcctgtttactcagagtttatattttccttcagttatattttaaatcaaaaggtctgggtaatgtatacttttgattaatatatactttttttaaaaaacaaaaaacaatgtaatggttaatagtagaaatgtgccacacttttcaagttttatataacatatgaaattcagttaaaagaatgtgtgtttcataatgacttttaactggtaaaaatattacttgcacgaagt

SEQ ID NO: 2881 - DNA, 490 bp, Homo sapiens
  misc_feature 451: n = A,T,C or G
actttggcctctctgggatagaagttattcagcaggcacacaacagaggcagttccagatttcaactgctcatcagatggcgggaagatgaagacagatggtgcagccacagttcgtttgatctccaccttggtccctccgccgaaggtgaccgggtaagtattaaggtgttgacagtaataagttccaaaatcttcaggttgcaggctgctgatggtgagagtgaagtctgccccagacccactgccgctgaaccttgatgggaccccacgttgtaaagtggatgtagcatagatcaggagtttaggggccttccctggtccttgctgataccaggctacagaaccggcaatgccctgactggcccggcaagtgatggtgactctgtctcctatagaagcagacagggaggacggagactgggtcaactggatggcacaggtggcacctngggagccagagcagcaggagccccaggagctgagcgggg

SEQ ID NO: 2882 - DNA, 325 bp, Homo sapiens
gccgggcacggtggctcacgcctgtaatcccagcactttgggaggtcaaggtgggtggatcatgaggtcaggagatcgagagcatcctggctaacaccgtgaaaccccgtctctactgaaaatacaaaaaaaaaaattagctgggtgtggtggcgggcacctgtaatcccagctacttgggaggctgaggcaggagaatctcttgaatccaggaggcagaggttgcagtgagccgagatcatgccactgcactccagcctgggtgacagagcgagactccatctcaaaaaaaaaagaaaaaagaaagccaggccccaaatctggt

SEQ ID NO: 2883 - DNA, 402 bp, Homo sapiens
actacacgcgcctgggcaacgacttccacacgaacaagcgcgtgtgcgaggagatcgccattatccccagcaaaaagctccgcaacaagatagcaggttatgtcacgcatctgatgaagcgaattcagagaggcccagtaagaggtatctccatcaagctgcaggaggaggagagagaaaggagagacaattatgttcctgaggtctcagccttggatcaggagattattgaagtagatcctgacactaaggaaatgctgaagcttttggacttcggcagtctgtccaaccttcaggtcactcagcctacagttgggatgaatttcaaaacgcctcggggacctgtttgaattttttctgtagtgctgtattattttcaataaatctgggacaacaaaaaaa

SEQ ID NO: 2884 - DNA, 579 bp, Homo sapiens
  misc_feature 542, 553: n = A,T,C or G
actgttggggctatgtagcgtgtggcctcatcagtctccccaccaaaagctatcttttgtccttcaagcaaacttagtatcctcttaaaatgacgaagattgatgatcctttcataatcaggagactcttttatattttctccataaaattccttcactgtttccttaatcttccatacaatttgattttggagggatgcttcacagagaatatagtcgggtgcaatgcaggtttggccacaattcatgtattttccccaggttatgcgtctgcaaacaatgtccaagtcacaatctttatcaatataacatggacttttccctcccagttcaagagtcacaggggtcagatgcttggcagcagcttccatgacaattttgccaaccgcagtgtttcccgtatagaaaatgtggtcaaatcgctgcttcaggagctccgtggtttcctcaacaccaccattaataacaatatagagatcctggtctaaatactgagggagaagctttgccaagatctttggctgtattttcactcagttcanaaggctttatnatcacagcatttcctgcagcgatggc

SEQ ID NO: 2885 - DNA, 363 bp, Homo sapiens
acaagaaagtatggtgcaacagcaacactccagcagatgttatagtgtgctacgggagcccaggagaaggcggagtgatcaattttggggaagacaagatgtggcagaagcgttcacaaaagtaatggtgtctgagcagggttctaagggatgcataggagttctctggcagatggttggggaaactttcaggctgaggaaatatctcaagcagacatgtagaggtatgaaagacacagggcggaggtgccggggcatggctctgtgagggcacgggtatgaggctagaggagccctgggtctgcctttacttacccgggtctgctctagccctagccctcgggagtcagggaaggggaattg

SEQ ID NO: 2886 - DNA, 331 bp, Homo sapiens
  misc_feature 311: n = A,T,C or G
accaaacatagcccttaggcctgggctaggctctcaaaggtctttcccagaaatggaggcagcagtagcttcaaacaggcacaaaaacagccaggaggaggcagcatccactccatgaaggcctaagacaatgaaaggaagccagagcaacagaccaccttgggatccggggagaagggtaaatgggcaaaagggttgtatttcctgatgctctcagaacatcagaccacaccatgtgaatttaagcaggactattttaagtggggaaacaatactagaagcatttggtgtattttcctggcactcacctnctaggtaagcaggagagcgg

SEQ ID NO: 2887 - DNA, 284 bp, Homo sapiens
  misc_feature 259, 261: n = A,T,C or G
actgcccagaaggagttcataaagaatacaaagaagaccccaaaagatgtcacgatggcactattgaattcacgagcatcgatgcacacaatggcgtggccccatcaagacgtggtgatttggaaatacttggttattgcatgatccaatggcttactggccatcttccttgggaggataatttgaaagatcctaaatatgttagagattccaaaattagatacagagaaaatattgcaagtttgatggacaaatgttntnctgagaaaaacaaaccaggtgaa

SEQ ID NO: 2888 - DNA, 328 bp, Homo sapiens
acggtagaactgctattattcatcctatgtgggtaattgaggagtatgctaagattttgcgtagctgggtttggtttaatccacctcaactgcctgctatgatggataagattgagagagtgaggagaaggcttacgtttagtgagggagagatttggtatatgattgagatgggggctagtttttgtcatgtgagaagaagcaggccggatgtcagaggggtgccttgggtaacctctgggactcagaagtgaaagggggctattcctagttttattgctatagccattatgattattaatgatgagtattgattggtagtattggt

SEQ ID NO: 2889 - DNA, 473 bp, Homo sapiens
acttatttcaacaattcttagagatgctagctagtgttgaagctaaaaatagctttatttatgctgaattgtgatttttttatgccaaaatttttttagttctaatcattgatgatagcttggaaataaataattatgccatggcatttgacagttcattattcctataagaattaaattgagtttagagagaatggtggtgttgagctgattattaacagttactgaaatcaaatatttatttgttacattattccatttgtattttaggtttccttttacattctttttatatgcattctgacattacatattttttaagactatggaaataatttaaagatttaagctctggtggatgattatctgctaagtaagtctgaaaatgtaatattttgataatactgtaatatacctgtcacacaaatgcttttctaatgttttaaccttgagtattgcagttgctgctttgt

SEQ ID NO: 2890 - DNA, 218 bp, Homo sapiens
actaatggtctacatccgattcaaaaccacatagttcattgatcacagatgcatggtattagtcacgaaagtttcagaacacattgtgttgattttgaaaggtcatttgcatcttctatgatttcaactttatctccatttaacttgcttgtaaagtatgtatgatgtattgtatatttaaaatcagcagaacggcaatattactctataatttttta

SEQ ID NO: 2891 - DNA, 197 bp, Homo sapiens
ccaagtggagcctcctgcagcagcagaagacggctcgaagcaacatggacaacatgttcgagagctacatcaacaaccttaggcggcagctggagactctgggccaggagaagctgaagctggaggcggagcttggcaacatgcaggggctggtggaggacttcaagaacaagtatgaggatgagatcaataagcgt

SEQ ID NO: 2892 - DNA, 147 bp, Homo sapiens
acattgctcctggaatgaaggtttatattgacccttttacctacgaggaccctaatgaggctgttcgggagtttgccaaggagatcgacgtgtcctgcgtcaagatcgaggaggtgatcggagctggggaatttggggaagtgtgcc

SEQ ID NO: 2893 - DNA, 145 bp, Homo sapiens
aaaacagtcatctagaattcactgagttttgtttcactttgacatttggggatctggtgggcagtcgaaccatggtgaactccacctccgtggaataaatggagattcagcgtgggtgttgaatccagcacgtctgtgtgagtaa

SEQ ID NO: 2894 - DNA, 504 bp, Homo sapiens
  misc_feature 474: n = A,T,C or G
accgaccatagagcaagaatcaagattctgctaactcctgcacagccccgtcctcttcctttctgctagcctggctaaatctgctcattatttcagaggggaaacctagcaaactaagagtgataagggccctactacactggcttttttaggcttagagacagaaactttagcattggcccagtagtggcttctagctctaaatgtttgccccgccatccctttccacagtatccttcttccctcctcccctgtctctggctgtctcgagcagtctagaagagtgcatctccagcctatgaaacagctgggtctttggccataagaagtaaagatttgaagacagaaggaagaaactcaggagtaagcttctagaccccttcagcttctacacccttctgccctctctccattgcctgcaccccaccccagccactcaactcctgcttgtttttcctttggccataggaaggnttaccagtagaatccttgctaggttgatgt

SEQ ID NO: 2895 - DNA, 201 bp, Homo sapiens
  misc_feature 165, 167, 183, 185: n = A,T,C or G
acttgtggttggctatggtgatcttaatgggaaagaatactggcttgtgaaaaacagctggggccacaactttggtgaagaaggatatattcggatggcaagaaataaaggaaatcattgtgggattgctagctttccctcttacccagaaatctagaggatctntnctttttataacaaatnangaaatatgaagcactt

SEQ ID NO: 2896 - DNA, 220 bp, Homo sapiens
acaagactcaagtaaatagaaaggcagctttcaatcacaaatcagtttttcagattttactgtggaagcatatttaatgcacacatttgaatgttacacataaataattttaacgatggagtccaagttctggattttacattagatctgcatatataagacacttgtggtcaaatttcaagattggtaaagccagtttcaagctgcttatattttgagt

SEQ ID NO: 2897 - DNA, 348 bp, Homo sapiens
acttttcataagcagtttgatttctgaaaaatacagtaacataattttagtaactactaaaatttctttaaaactccctatcaatctgaagaacaaactaaaaacctgtttattacatgaatgctacttatgagaatttaaaatatgggttcacttcctattttccacaagtctttgacttgtttatttactaaattaacagaacgtgggatgcagttttttaagttagcaacttccttagggttactgggaagtagagtaattatgaaaaagggaacacttcaattattgtataaaagattgctttgcatactgattacttcttgaaccccaaaaagtgctatttag

SEQ ID NO: 2898 - DNA, 522 bp, Homo sapiens
  misc_feature 409: n = A,T,C or G
actgattttaaaaactaataacttaaaactgccacacgcaaaaaagaaaaccaaagtggtccacaaaacattctcctttccttctgaaggttttacgatgcattgttatcattaaccagtcttttactactaaacttaaatggccaattgaaacaaacagttctgagaccgttcttccaccactgattaagagtggggtggcaggtattagggataatattcatttagccttctgagctttctgggcagacttggtgaccttgccagctccagcagccttcttgtccactgctttgatgacacccaccgcaactgtctgtctcatatcacgaacagcaaagcgacccaaaggtggatagtctgagaagctctcaacacacatgggcttgccaggaaccatatcaacaantggcagcatcaccagacttcaagaatttagggccatcttccagctttttaccagaacggcgatcaatcttttccttcagctcagcaaacttgcatgcaatgtgagccgtgtgg

SEQ ID NO: 2899 - DNA, 416 bp, Homo sapiens
  misc_feature 416: n = A,T,C or G
aggtacctgtggttaggtaacccttattttacttagtggcctcagagcacaagagtagtgatgctggcatatttttataattgatattattagttattagttattgctgttaatctcctactgtgcctaatttataaattgaatgatcataggtatacatgcttaagagaaaacagtatatataaggtttagtactcaacagacccagggaagggagacacaggcacgcaggacagcaggagtgtgataacctcaggttctgtgtgggggggagtgtgcaagagttcggacagtctgcagggtgggtgtgcctgttgggtttgggctcctggcctgctcacggtgctaggactactcagcagccttgaggtctacgcacccctccacgagagccctggactcacgggacacgctgn

SEQ ID NO: 2900 - DNA, 480 bp, Homo sapiens
  misc_feature 471: n = A,T,C or G
acagtgatagctccccctgggcaatacaatacaagaacagtgggttttgtcaaattggaacaaggaaacagaaccacagaaataaatacattggttaacatcagattagttcaggttacttttttgtaaaagttaaagtagaggggacttctgtattatgctaactcaagtagactggaatctcctgtgttcttttttttttttaaattggttttaattttttttaattggatctatcttcttccttaacatttcagttggagtatgtagcatttagcaccactggctcaatgcgctcacctaggtgagagtgtgaccaaatcttaaagcattagtgctattatcagttaccaccatttggggcttttatccttcatgggttatgatgttctcctgatgacacatttctctgagttttgtaattccagccaaagagagaccattcactatttgatggctggctgcatgcanacatttaaa

SEQ ID NO: 2901 - DNA, 534 bp, Homo sapiens
accattatgtaatcatataatcttgctaacagatctaacagattacttttttttttttttttttttttgagacagagccttgctctgtcgcccaggctggagtgcagtggcgcgatctctactcactgtaacctccgcctcccaggttcaggcaattcttctgcctcggcctcccaagtagctgggactgcaggcaggcactaccacacccggctaatttttgtatgtttagtggagacggggtttcaccatgttggccaggctggtctggaactcttgacctcaagtgatccgtctgcctctgcctcccaaagtgctgggattataggagtgagccactatgcctgtcctctagggaaaatctttaattcattctggacaatgagaaaacttttatttttacttttagttaacaatactcaggaaaataaaaagtgtgctttttaatcttagtaacccaatttgagtttgaaacaaatttacataattttagctgcttaatatgctgctgaagataaatgcagtaaatatccc

SEQ ID NO: 2902 - DNA, 562 bp, Homo sapiens
acttttaaggcataataagggttaacattctaggcagtataaacacaccccataatgcaagtaataggtaatctagagatgtggactttattgctatatgggaattacatttaaatttgagggcattttatataaagaaaaatacagacctataaagtttggcatattcattaagttatcttttaatatttttttctagaaaacaggtgacatttgtatctacgataaaaatttttatacagaacctactgcctcaaactgaatcccatcaagaaaactagtttctattgtattagtaactcaaaataaattatcacttcgaaaacttgctttcccacactaaggtaagttcagactagattgaacactccagaattttttactacagactgtttttaagttagaagtgatggcaattttataaatagagaatatacttccactgatgcccttactgtgccaaaacaaaaatcttaagaaaagcaagtagacaccttcataactatgaatgaagctgctgaagtagtgtttaggatcctccatggcagttagtgaatgtaag

SEQ ID NO: 2903 - DNA, 472 bp, Homo sapiens
acttctgaaaatgatgacccttccaaaatggttatggttctggcagctactaattttccctgggatatagatgaggctttaagacgacgccttgagaaacgaatctatattcctttgccgtcagcaaaaggcagggaggagctattacgaataagtctacgtgagttggaattggctgatgatgttgaccttgcaagtatagcagaaaacatggaaggttattcaggtgcggacattaccaacgtgtgcagggatgcgtccttgatggcaatgagaaggcgcattgaaggtttgactccagaggaaatccgaaatctttccaaagaagaaatgcacatgcctacaactatggaggatttcgagatggctttaaaaaaggtttctaagtcagtgtctgctgcagacattgaaagatacgagaaatggatatttgagtttggatcatgctaaattctcacatgtaaactgcgag

SEQ ID NO: 2904 - DNA, 397 bp, Homo sapiens
accatgaaatacatatatttcataaggttcagttacaaaatggattgtttcaaatggcaatttcttacactaacctgattatgaaaaaaagaagtctgtatcatctgcttccaagtctgttatgtccaaatatattttaattatgcatttattttgctacttttataaatattagagatttcaccttaaattatttttgtaactagttctagaacatgttttccaattattatttttctaatggagacatataattgacctatgtttatgcatatatgttctctacacagtgaaactttttttaaaaagaatagtaaagaaaatgcggaagctctggctctccaaggcaaagtcaaaaaaaaaaaaaagcgggggggaatgcgaggaacattttata

SEQ ID NO: 2905 - DNA, 201 bp, Homo sapiens
  misc_feature 177, 196: n = A,T,C or G
accacccaggctccactgactgtggtttccaaacatctctccactgactgtggttttcaaccacaaggaaaggaaaatggaatattctttggctcttccagcctagacacaactcctgacctaagacattgagtggagagtcctaaccctttggaagttgaactttctgctttcttnctgtgactttggaactgantttgc

SEQ ID NO: 2906 - DNA, 205 bp, Homo sapiens
  misc_feature 149, 195, 199: n = A,T,C or G
actgatcccagggaggaagtgttggggcttcatgaactaggatgaaaggaggcccctgagccatgacaaggggcacatccaggatttccgccaccctgaatttagtagagctagtaggccctggtcgtcactctgggcagggatgccgncagccttgagggtcgccacccacctgtgtgttgccctctgtcctgncggngaaaca

SEQ ID NO: 2907 - DNA, 470 bp, Homo sapiens
  misc_feature 69, 124, 136, 144, 159, 170, 227, 417, 423, 428, 467: n = A,T,C or G
acaagctttttttttttttttttttttttttttttctcactaattttaatgtctgtatacaaggtttanatatttagttttaatttgtttaagctggaaggaaaaaaacacacacaaagaaatntaggacaagttntcctgganaactatacccaaaanaggaacattancactgatggtaactcaggataaaaagggagaatgagatccaagagtaaattagctgngttgttacataaatagaatttagttagaaatagagctactactctatttcaaagatatgaaatagcaaatatcctgacaaaaaggttaacatactcttgttcttactgggtaggacatgaaacaacaaccaattacatatcttttaaaactacttgaataagcaatacttacataaaacatagctcaatntatcanatganaaaatggcttaatactggtaatcattcacaccgttatanagt

SEQ ID NO: 2908 - DNA, 202 bp, Homo sapiens; identical to SEQ ID NO: 2580

SEQ ID NO: 2909 - DNA, 207 bp, Homo sapiens
  misc_feature 154, 193: n = A,T,C or G
acatggatgaaaactaaaggctcgagttaatcacattgtagtttttaaatttctacagcctagagctcactagtcacaggtcttttaggtccttctggatgtcccacagggtatctgcacttttcttgagctgagcaacctcatcatcctttancttctggttgataacgctggttaatccccgggcattgangatacatggaaggc

SEQ ID NO: 2910 - DNA, 333 bp, Homo sapiens
  misc_feature 257, 284: n = A,T,C or G
acctaagtctccttttcttcataacatagatactgacatgataggaagctctcagcttagggaaagagaataaattttagattatagaacatggattcaaaagtgactggaacaaattggctgacaccttactggtaacctgctattcttctggtgttatccttcaggattgttccactaaaatttatttttcaaaaaatttacttcacattattctatgtaagtgatgacttgtcagtgttccaggtgtatcttanctaaaactagagaatgccctaacttanatggtttttgaagcctatacaattggtattgtttgacccttaagctttt

SEQ ID NO: 2911 - DNA, 346 bp, Homo sapiens
acaggatttttgtttaagagaaggattgtttagactcaagaggtgactatgttgtgggtcttttgataattcatgaatacagatttgctttgaccgatcactagatactgcctcctcaatttcaaaagcaatataacgtttgtatatgctgtttaatttaagttaatgttaagtaatcatttctcattccaaagacaatgcaaaaaacttcagcactgcttgagagttgtatttcagccacagatattttctccattggaaagctattttcattttagaaaaatgggttgtttgaagatgaaagtcttttatcttttttcacaatttattttggttatatgttcgt

SEQ ID NO: 2912 - DNA, 309 bp, Homo sapiens
ggtacgatgtctagtgatgagtttgctaatacaatgccagtcaggccacctacggtgaaaagaaagatgaatcctagggctcagagcactgcagcagatcatttcatattgcttccgtggagtgtggcgagtcagctaaatactttgacgccggtggggatagcgatgattatggtagcggaggtgaaatatgctcgtgtgtctacgtctattcctactgtaaatatatggtgtgctcacacgataaaccctaggaagccaattgatatcatagctcagaccatacctatgtatccaaatggttctttt

SEQ ID NO: 2913 - DNA, 222 bp, Homo sapiens
actccgaggcttgtaggagggtaaaatagagatccagtaaaattgtaataagcagtgcttgaattatttggtttcggttgttttctattagactatggtgagctcaggtgattgatactcctgatgcgagtaatacggatgtgtttaggagtgggacttctaggggatttagcggggtgatgcctgttgggggccagtgccctcctaattggggggtagggg

SEQ ID NO: 2914 - DNA, 337 bp, Homo sapiens
acaacttatcaacacaaggcagccacaggccaaaatcattgtattgggtttgttacctcgaggtgagaaacccaatcctttgaggcaaaagaacgccaaggtgaaccaactcctcaaggtttcgctgccgaagcttgccaacgtgcagctcctggataccgacgggggttttgtgcactcggacggtgccatctcctgccacgacatgtttgattttctgcatctgacaggagggggctatgcaaagatctgcaaacccctgcatgaactgatcatgcagttgttggaggaaacacctgaggagaaacaaaccaccattgcctgactggctcttatc

SEQ ID NO: 2915 - DNA, 408 bp, Homo sapiens
actctgaggcttgtaggagggtaaaatagagacccagtaaaattgtaataagcagtgcttgaattatttggtttcggttgttttctattagactatggtgagctcaggtgattgatactcctgatgcgagtaatacggatgtgtttaggagtgggacttctaggggatttagcggggtgatgcctgttgggggccagtgccctcctaattggggggtaggggctaggctggagtggtaaaaggctcagaaaaatcctgcgaagaaaaaaacttctgaggtaataaataggattatcccgtatcgaaggcctttttggacaggtggtgtgtggtggccttggtatgtgctttctcgtgttacatcgcgccatcattggtatatggttagtgtgttggttagtaggccta

SEQ ID NO: 2916 - DNA, 398 bp, Homo sapiens
actgccctgccagtaggaaagaaaggaggagaaacaacttttctggacaaacacacaagccaggacacaacacacgaaacaagcaagcccattcattcaaactactgagggactggagacagataagccatgtgaacagttgatcaaacctacaccaataaaaactctggacagcctgggtgcggtggctcacgcctgtaatcccagcactttgggaggccgaggcgggcagatcacctgaggacaggagttcgagaccatcctggccaacatggtaaagccccatccctactaaaaatacaaaaattaactgggcgtggtggcaggtgcctgtaatcccagctactcaggaggttgaggcaggagaatggcttgaacccaggaggcggaggttgcag

SEQ ID NO: 2917 - DNA, 595 bp, Homo sapiens
  misc_feature 559, 568, 573: n = A,T,C or G
ggctattgatattgacaccaaatggagtggcttctcagcctcttaatgtcttaagtaagtgcttaatttggaatagagaaaccagtatattttaaaaaagaaaaatattctttgtagcaactgtaaattctcccattataacagtgaacagagctccaggtaataacgcataggcatgtcaggttgcatctgtatatttgactacattagtattagtgacatcaggtggatataaaagaaaacccttggaaagagaactgccttagccatgatttcgttagtagacctatttatgattcaattgcaattttcagataggatgtgaacatggaatttcattgaaaatagtttaattttttatataaaaggttttgtatataatgtgtgtcagtgactattttcaaaatcattttcatcaagacaccttttttctaaaataggcattgcatacacatatgcacacgtatgtgcatgtgtcacacattttttgtataatgttgggtttgattataaaagtgttgtcaaatgttttatttatctgcatatagcagtggttggncttttttgnattgnaatttttgcgcattgatgcatt

SEQ ID NO: 2918 - DNA, 297 bp, Homo sapiens
caagactgggacgtctagtccacaggaagacctgcaccactgtcgccttcacacaggtgaactcggaagacaaaggcgctttggctaagctggtggaagctatcaggaccaattacaatgacagatacgatgagatccgccgtcactggggtggcaatgtcctgggtcctaagtctgtggctcgtatcgccaagctcgaaaaggcaaaggctaaagaacttgccactaaactgggttaaatgtgtacaagctttttttttttttttttttttttttttttttttttttttttttttt

SEQ ID NO: 2919 - DNA, 558 bp, Homo sapiens
acagaagcccttcattagtagtcttaaagaacccctggttggggttaaatcctgacttcagtagttcatttaaaaactctctgaaaataccaccaccatcaatgccagcttcatccaggccatgggcattgagcaagtgcacacggatccgctttttcaaatcaggctcattttctggagaaagtttgtcataagcatcttcataaatgtaatttcttcttattgtgacattaattccatccagaaatggaccatctccttgaacttcttgcttatctgcataaatcaacctctgaaagatctttactcgttcctcaaatggaaccacaaaaggcaactctgtcaggacagcaagctgtctttcctcagacacagacagcggcggggactccaaacccacgtccagggtggactgcagcgggcctatcctccccatccgccggaacctccacacatgcctggatgctggcacatagagctgagtgaccttatctgctttaatatcttcttgttctgacagccagtggtttggaggacaaaaatttctcctcgtgtctc

SEQ ID NO: 2920 - DNA, 444 bp, Homo sapiens
ctcgccatcatggaaaatgccaatgttctggcccgttatgccagtatctgccagcagaatggcattgtgcccatcgtggagcctgagatcctccctgatggggaccatgacttgaagcgctgccagtatgtgaccgagaaggtgctggctgctgtctacaaggctctgagagaccaccacatctacctggaaggcaccttgctgaagcccaacatggtcaccccaggccatgcttgcactcagaagttttctcatgaggagattgccatggcgaccgtcacagcgctgcgccgcacagtgccccccgctgtcactgggatcaccttcctgtctggaggccagagtgaggaggaagcgtccatcaacctcaatgccattaacaagtgccccctgctgaagccctgggccctgaccttctcctacggccgagccctgcaggcctct

SEQ ID NO: 2921 - DNA, 534 bp, Homo sapiens
accatcatttgctacaatctagacagatcatcctgtctacaaaaaatcattttctacatttctaagaccattatcagtttatctgctcctgctagaaaaggacatactttttgtcaatttacattaacaaaggctctgctactccccatttactcgctgcaatgaaaactggtaagccaagggtaaagcttaagtatcagggactatgaatttagggtagaagtgaaaataaccaaagtggaactaaatcccctattcttgagtgcaactgagatcaagtaaacttcgctggactttcttcttaactataaaactattaaccagaaggtaaagtcacacaattttacctcccaacaaacttttaaaataaaaatttccaaaaaatttagatgtctaggttttgttatatcttaccaagagttacacagacataaatttgtatttaacttcagttaaacatctattcactttttaaaaatgctgtctgcaaataaactactggacatcttaagcttactaaaaaaaacttaagat

SEQ ID NO: 2922 - DNA, 173 bp, Homo sapiens
  misc_feature 85, 98, 115, 155, 159: n = A,T,C or G
acgggaccctgttcacgatggaccgggtgctgacccccccaatggggactgtcatggatgtcctgaagggagacaatcgctttancatgctggtagcntgccatccagtctgcangactgacggagaccctcaaccgggaaggagtctacacagncttngctcccacaaatga

SEQ ID NO: 2923 - DNA, 519 bp, Homo sapiens
acatttataaagattttctttttgcagtaaataatttaggtcaaagtgatgacctcccatgctctaattctgattgattaaaccaacctgaagggtaaactggagactctttggcctgttagtcaataacaaaatggtttgtaaagaaaagaaaaaataaataccatatacaaataagtataactagcattcaagtctgttgcacctgtgtgttttagtgaaagggagaatgaaacttgtatgcatttgacgtgagcaggtattcacacagctaggaaacaggaaaagacggtaggatggcaacatcaccttctattgcacatttagtttaagacagcactttccgttgaaacacaactaccccaatggcatagtcttgtgatgtgggacagctaacgtgatggacgtctgcgcagcaggcccgaggttaggacggccactctgttagtgcaggtgagtgtaggtgcctcctcagctacactatctggaggatgtcacctgagtgcaactgggcaggcc

SEQ ID NO: 2924 - DNA, 444 bp, Homo sapiens
  misc_feature 432: n = A,T,C or G
acctgtgggtttattacctatgggtttatatcctcaaatacgacattctagtcaaagtcttggtaatataaccaatgttttcaaatgtattctgtcatacaaagagcagatttttattgaacttgtgcaataactatattaccatacaatataaatattcatgaatagtttcccaagtctggagcgaccacatagggagaaaatgtaaatgtctcaatttttgttcacaaaagtatattttatcaaattgctgtaagctgtggatagcttaaaagaaaaaaagtttcctgaaatctgggaaacaagacatttaaagaatcagcaaaatttcaaataaaaaattatgaaaatattatcctcattagttcatttagtcccatgaaattaattattttctctgcttgatcttggtggacagtttcatgaagctgncagttagttcat

SEQ ID NO: 2925 - DNA, 491 bp, Homo sapiens; identical to SEQ ID NO: 2871

SEQ ID NO: 2926 - DNA, 516 bp, Homo sapiens
aaaactaataagaaaacctcctaatatcattttgtgactgtaaacaattatttattagcaaacaattgatcccagaagggcaaattgtttgagtcagtaatgagctgagaaaagacagagcatatctgtgtatttggaaaaataattgtaacgtaattgcagtgcatttagacaggcatctatttggacctgtttctatctctaaatgaatttttggaaacattaatgaggtttacatatttctctgacatttatatagttcttatgtccatttcagttgaccagccgctggtgattaaagttaaaaagaaaaaaattatagtgagaatgagattcatttcaatgtaatgcactaaagcagaacacgaacttagcttggcttattctaggtagttccaaatagtatttttgttgtcaaactttaaaatttatattaatttgcaaatgtatgtctctgagtaggacttggacctttcctgagatttattttatccgtgatgtattttttttattctt

SEQ ID NO: 2927 - DNA, 469 bp, Homo sapiens
acactaacaaacacttttacaaagacattcagaaatatttgcagcaggttttataagactctgatataaaacaaagtaaaataaaacgttttgaaatggcaaaatcggtttacctagcctgaattgcttcaaagaggcatttgcacttcttgtcctggcttaataaaacaaagtaaaataaaacattttgaaatttcaaaatcagtttagcctaaattgcttcaaagaggcatttgcacttcttgtcctggcttaaaaacaaaccctgaaattactttcttttatccaaatcaattgaccatattaatctgcataaagtctatgaggatacgttttgataaatgctataaacacaaaattaaggcaaatctgatagttattgtcaaataaatagcacatttagaagggcctttgttaataaaatgcctctaatgtatccagaggtatagatttcaaagggcaagtctgt

SEQ ID NO: 2928 - DNA, 204 bp, Homo sapiens
  misc_feature 51, 120, 173, 193: n = A,T,C or G
ctttttttttttttttttttttttttttttttattttgacaacaaattatnttttaaatgtttcatatttacttttatatttccatacaatcagaaacagtaaaaaaaatttggagagcncataaaaacatcttaaagttaaaaatataaagccttgtatttaaaaatgcagncatttaaataatattataanaatctatttgt

SEQ ID NO: 2929 - DNA, 272 bp, Homo sapiens
cagtctttcaagagagatacaaacaaggcagaaacatttaaactagtattaaaggtagtttaccaaagcattttttgttttcttaccttgaaaacacagaaccgttaattccttggtttaagcagttgctaagttttttaattttaggctcagaggcccataggaggttttaagatttatgtttagtccgataggtgaggtctttgatattttgaattttaactccttttatgatacatcacagtaacctcatttttgaagtctttctttgt

SEQ ID NO: 2930 - DNA, 266 bp, Homo sapiens
  misc_feature 190, 223, 239, 240, 261, 266: n = A,T,C or G
acaagctaagcagggggaaggaggagggccagagagcagccggaaagaagaaaagaggaacacggcagggggttctgggggaggagggcctcacatcaccccgcagatgagcgtctccaccacgaaggtgttctcgaagtggcggatggcattgcagttcttggccccacgcttgttgatccgcctccgngttgcccggcgccggagccggtaggtgtctttnccgttgcacaggtggnngatgaaggaccccagggcctncttgn

SEQ ID NO: 2931 - DNA, 394 bp, Homo sapiens
  misc_feature 169, 366: n = A,T,C or G
actctgaggcttgtaggagggtaaaatagagacccagtaaaattgtaataagcagtgcttgaattatttggtttcggttgttttctattagactatggtgagctcaggtgattgatactcctgatgcgagtaatacggatgtgtttaggagtgggacttctaggggatntagcggggtgatgcctgttgggggccagtgccctcctaattggggggtaggggctaggctggagtggtaaaaggctcagaaaaatcctgcgaagaaaaaaacttctgaggtaataaataggattatcccgtatcgaaggcctttttggacaggtggtgtgtggtggccttggtatgtgctttctcgtgttacatcgngccatcattggtatatggttagtgtgtt

SEQ ID NO: 2932 - DNA, 337 bp, Homo sapiens
  misc_feature 120: n = A,T,C or G
acacttactcctcagacaggataaactgtcctggggtgtacgatgtctagtgatgagtttgctaatacaatgccagtcaggccacctacggtgaaaagaaagatgaatcctagggctcanagcactgcagcagatcatttcatattgcttccgtggagtgtggcgagtcagctaaatactttgacgccggtggggatagcgatgattatggtagcggaggtgaaatatgctcgtgtgtctacgtctattcctactgtaaatatatggtgtgctcacacgataaaccctaggaagccaattgatatcatagctcagaccatacctatgtatccaaatg

SEQ ID NO: 2933 - DNA, 133 bp, Homo sapiens
acagatatcaagccagaatggttggtgaaaattgcccctcaatattatgacatgagcaatttcccacagtgtgaagcaaagagacagttggaccgcatcattgccaaacttcaatccaaggaatattcacagt

SEQ ID NO: 2934 - DNA, 292 bp, Homo sapiens
acagaactccatgaactatcttcttgatcttctgcatttcatcatggtcatcctggctccaaatcctgaagcttttggcttgctcgtattgatttcagtctcctttgtggcaatgggccacattatgtatttccgatttgcccaaaatactctgggaaacaagctctttgcttgcggtcctgatgcaaaagaagttaggaaggaaaatcaagcaaatacatctgttgtttgagacagtttaactgttgctatcctgttactagattatatagagcacatgtgcttattttgt

SEQ ID NO: 2935 - DNA, 488 bp, Homo sapiens
acatcaataaaaataaaataatttttcctatttactttacaactgtgaattacttgccacaagaaatgtatttctattatggtcattcagatttacaaagaattaagcctatgaaataaagcaaacccaatatattctctagtcatatttacagcagaatctcagtagcatttttaaaatatcccaagaagaagaattaaactttgagcataaatgacatactttagttcacagcagcactgacattaaaattgtctacacaaaatgtgtagaaaacccaaaaagtatgcttatttcttccacctgaactattaatcattttaactttttaatttagaatgcatgagagtggcatttgtttaagctcaaatgttcaaagttttgagccacccatggcctatataattgcaacctttctattttttcttcactattactatttataattgtcaagttccagtttcttttgcatttattgcaagaaagtt

SEQ ID NO: 2936 - DNA, 390 bp, Homo sapiens
acgcaaaatttcacattttaatatgcttagaaggagtttttaaagaagtagaaatgatttccttggcctctgactttcagtgatgaaaatgcaaccatgcagtcccccctttgcagaagggcagttcttcccaggctttctggaagcaggggcttccgaggagtctccacccacctcacagaacactcactatgagccctgcacagacagcaggattcacaatctccaatagggatggcaggggcagcccttaaaacttgaagaggtcgatgaagtgctgcggagacacaggcgtgaagcagctgtcagggtcggccgccgtgcaggggtgtcctgagtccttccaaaagagaatgctgcagtgccgacagaaatgcagtgtgtctccgt

SEQ ID NO: 2937 - DNA, 280 bp, Homo sapiens
  misc_feature 229, 262, 268: n = A,T,C or G
acgagtttgaagctaggaacccacgggaactgactgtggtccagggagagaagctggaggttctggaccacagcgagcggtggtggctggtgaagaatgaggcgggacggagcggctacattccaagcaacatcctggagcccctacagccggggacccctgggacccagggccagtcaccctctcgggttccaatgcttcgacttacctcgaggcctgaagaggtcanagactggctgcaggcagagaacttctccactgncacggngaggacacttgg

SEQ ID NO: 2938 - DNA, 160 bp, Homo sapiens
  misc_feature 119: n = A,T,C or G
gtactctgaggcttgtaggagggtaaaatagagacccagtaaaattgtaataagcagtgcttgaattatttggtttcggttgttttctattagactatggtgagctcaggtgattgatnctcctgatgcgagtaatacggatgtgtttaggagtgggact

SEQ ID NO: 2939 - DNA, 458 bp, Homo sapiens
  misc_feature 384: n = A,T,C or G
acagtgcagtatgcctaggttatcccatatcacaataaaaaaagtctgctggtctgcctactagtgatataaaatggcatcatatcctaaagctctttattgtgaaagtatgtttcttccacacaaccaaccagttaagtatgagaattctagtagggatgtagattaaccttttatctaatagttttggcatcaaaattctttaatattgattgttttacattaacctttcaactttctaacatctgaactttttaaatgttcaaaaacatttgttttccacaaaccataaagttttacaaaagtaagattcactttcataatgctggcagacttactccttaatttaaggaatgtgagcaccttccttctttttgattttgnctaaaccctgtaaggaaaataaaggaagttaaaaaaaatagctatatagatatagatagctatatatagatagc

SEQ ID NO: 2940 - DNA, 115 bp, Homo sapiens
  misc_feature 50, 58, 74, 80, 89, 91: n = A,T,C or G
acaagcttttttttttttttttttttttttttttttttttttttttattnggttcaanctaatcctttttgtantcactnataggccananttagggctaggatgatgattaata

SEQ ID NO: 2941 - DNA, 468 bp, Homo sapiens
  misc_feature 260, 425, 462: n = A,T,C or G
acagtttctagcattaaacaaataaacaaggggagaaaataaaactcaaggagtgaaaatcaggaggtgtaataaaatgttcctcgcattcccccccgctttttttttttttttgactttgccttggagagccagagcttccgcattttctttactattctttttaaaaaaagtttcactgtgtagagaacatatatgcataaacataggtcaattatatgtctccattagaaaaataataattggaaaacatgttctanaactagttacaaaaataatttaaggtgaaatctctaatatttataaaagtagcaaaataaatgcataattaaaatatatttggacataacagacttggaagcagatgatacagacttctttttttcataatcaggttagtgtaagaaattgccatttgaaacagnccattttgtaactgaaccttatgaaatatatgtattncatggt

SEQ ID NO: 2942 - DNA, 358 bp, Homo sapiens
  misc_feature 351: n = A,T,C or G
acagattaacttaacacaaaaacccgaacatcaaaatgaaggtgtgtggaggaaaggtgctgctgggtctccctacaactgttcatttctttgtggggcagggggtagttcctgaatggctgtggtccaatgactaatgtaaaacaaaaacagaaacaaaaaaaacaaggaactgtcatttccacgaaagcacagcggcagtgattctagcaggcctcagggccctgggcctggggaggctacatgagggggagcctcagtcacaggatcaacctggggcccgaaggagcagggttccctgcctctccctctgcaacagatcatcccatccaacacaacccccaaaatgtngatgatg

SEQ ID NO: 2943 - DNA, 493 bp, Homo sapiens
  misc_feature 398, 411, 429: n = A,T,C or G
ttttttttttttttttgaaaaagtcatggaggccatggggttggcttgaaaccagctttggggggttcgattccttccttttttgtctagattttatgtatacgggttcttcgaatgtgtggtagggtggggggcatccatatagtcactccaggtttatggagggttcttctactattaggacttttcgcttcgaagcgaaggcttctcaaatcatgaaaattattaatattactgctgttagagaaatgaatgagcctacagatgataggatgtttcatgtggtgtatgcatcggggtagtccgagtaacgtcggggcattccggataggccgagaaagtgttgtgggaagaaagttagatttacgccgatgaatatgatagtgaaatggattttngcgtaggtttggntctagggcgtaacctganaataggggaaatcagtgaatgaagcctcctatgatggcaaatacagctcctattgataggacat

SEQ ID NO: 2944 - DNA, 303 bp, Homo sapiens
acaaacttgcactttcatttgctaatataaattcagttttattttaccattttagagactactaatgattaaatgtagaaggagagggtgcacatgtttttatgtggagtgtttaaaagataaatttataccactgtaatgtgcagcttttattaaaagagaaattggttgaactgctaggttgaatgagagacttcatctattggactattttttttaatccaggcatatggtctttagtaatggcttgtaatttgtgaaaacattaatttgggggttttccctgttttcagttgtccatgt

SEQ ID NO: 2945 - DNA, 302 bp, Homo sapiens
  misc_feature 224, 286, 289: n = A,T,C or G
acaggaaggtggggaccctcccccagactctactcagattccaatgagcaccagggagggaaaagatggaaaactaaaaggaaaaacaaaaggaaatccagaacaatccgcctagccctgcaggaggatcttgtgtcacagccaagggccagggaaggaaggaggatcactcttcatccgacgaagtccaccggccctgcctgcttcaggcttccaggagcctncccaggaagcggaggttgaggatcttgagctgctcatcaaggtccatacggacaatgccatnctnaccatcaatgctc

SEQ ID NO: 2946 - DNA, 476 bp, Homo sapiens
actgtatgtgttttgttaattctataaaggtatctgttagatattaaaggtgagaattagggcaggttaatcaaaaatggggaaggggaaatggtaaccaaaaagtaaccccatggtaaggtttatatgagtatatgtgaatatagagctaggaaaaaaagcccccccaaatacctttttaacccctctgattggctattattactatatttattattatttattgaaaccttagggaagattgaagattcatcccatacttctatataccatgcttaaaaatcacgtcattctttaaacaaaaatactcaagatcatttatatttatttggagagaaaactgtcctaatttagaatttccctcaaatctgagggacttttaagaaatgctaacagatttttctggaggaaatttagacaaaacaatgtcatttagtagaatatttcagtatttaagtggaatttcagtatactgt

SEQ ID NO: 2947 - DNA, 465 bp, Homo sapiens
acacttctgtcttcaaactgtatcttctttggatggaattaagatgtaactgtatagttttaagataaataaatgggaagttggtccaactaagatgacagcagatatattacatgcaggatttaatattttctaattctctcttttaaaaaaaaggatgctgttggattgggaaaaaaaaagtcaaaaaagaacccagattcaatatataaaaatgtcccacaataggtcgacaatggcagtaaaaataaggggaaaaaagcaatctttctggaacatcatttttcaataacatagaaacactaagtgccaggaagattcctattcatgtaattttagcatccaagtttccctctatttattttattggaacaaatgctttaaataaactatttgtcctcttcactgaagagagctggtctatttcatctttaatgagctagtttttgggaagattagccatgt

SEQ ID NO: 2948 - DNA, 303 bp, Homo sapiens
  misc_feature 218, 219, 265, 268: n = A,T,C or G
atcaccaccaaggacttaaaggagaagaaggaagttgtggaagaggcagaaaatggaagagacgcccctgctaacgggaatgctaatgaggaaaatggggagcaggaggctgacaatgaggtagacgaagaagaggaagaaggtggggaggaagaggaggaggaagaagaaggtgatggtgaggaagaggatggagatgaagatgaggaagctgagtnngctacgggcaagcgggcagctgaagatgatgaggatgacgatgtcnatnccaagaagcagaagaccgacgaggatgactagaca

SEQ ID NO: 2949 - DNA, 460 bp, Homo sapiens
caggaagctgctggaaggcgaggagagcaggatttctctgcctcttccaaacttttcctccctgaacctgagggaaactaatctggattcactccctctggttgatacccactcaaaaaggacacttctgattaagacggttgaaactagagatggacaggttatcaacgaaacttctcagcatcacgatgaccttgaataaaaattgcacacactcagtgcagcaatatattaccagcaagaataaaaaagaaatccatatcttaaagaaacagctttcaagtgcctttctgcagtttttcaggagcgcaagatagatttggaataggaataagctctagttcttaacaaccgacactcctacaagatttagaaaaaagtttacaacataatctagtttacagaaaaatcttgtgctagaatactttttaaaaggtattttgaataccattaaaactgc

SEQ ID NO: 2950 - DNA, 300 bp, Homo sapiens
cgaaaggaaagaaggccaagggaaagaaggtggctccggccccagctgtcgtgaagaagcaggaggctaagaaagtggtgaatcccctgtttgagaaaaggcctaagaattttggcattggacaggacatccagcccaaaagagacctcacccgctttgtgaaatggccccgctatatcaggttgcagcggcagagagccatcctctataagcggctgaaagtgcctcctgcgattaaccagttcacccaggccctggaccgccaaacagctactcagctgcttaagctggcccacaagt

SEQ ID NO: 2951 - DNA, 191 bp, Homo sapiens
acataggcggtatttaaataatggtgctatcttaaacaccaaatatcaactgcagttcactttttccgtgtggggactaatatcaagatttcatatgaattatagtataatccagaagtatgaaaaaatacatcatatttaacttataaagcattcatctgcatgttatattacagtaaatacaattaggt

SEQ ID NO: 2952 - DNA, 223 bp, Homo sapiens
actctaattttgattgcacagtaagatgattgataagaaagtcaatatatagatttcattttaaaaataagtattttgtaatctggcatagtatgtaatgagaattgttaggaactagaacagggaatttcagtttttaaaagcagaagaaaaatgttatctttttggggattccaatcccctcactaaacttatccccaagggttttctttcggtcagttgt

SEQ ID NO: 2953 - DNA, 509 bp, Homo sapiens
actgagttcccactgatgctaataggaaccgctcatgcataccaagggtagtaactcccccagggccacatgcaacccccaagtctgaggcacaactattacttctgccagtggatgctatacaagcatatttaaggctgtattcggctataaagagttcaacctactctttaatattctttctatgtagatcacatacacaattcaaaattttataggacaggtgaaaagtctccaaacactttttaaataccattctccatacaatttattgtcagcatatttacataggggagtgttcacactttaaaatgcaaccacaattttcaaattgttgtcacaatttctccaggattaccctcattctcattttccgacttttggccagcttcacatttgtcagattgttcattgcagttctcaggcaattctgatgttgctctgaaggagaataaaagttaaaagtattcactgccacccactctgggacaggcttggttgcaaagaaa

SEQ ID NO: 2954 - DNA, 172 bp, Homo sapiens
acggaggagaaaccaaggtgtatgttggtaacctgggaactggtgctggcaaaggagagttagaaagggctttcagttattatggtcctttaagaactgtatggattgcgagaaatcctccaggatttgcctttgtggaattcgaagatcctagagatgcagaagatgcagt

SEQ ID NO: 2955 - DNA, 354 bp, Homo sapiens
actctgaggcttgtaggagggtaaaatagagacccagtaaaattgtaataagcagtgcttgaattatttggtttcggttgttttctattagactatggtgagctcaggtgattgatactcctgatgcgagtaatacggatgtgtttaggagtgggacttctaggggatttagcggggtgatgcctgttgggggccagtgcccccctaattggggggtaggggctaggctggagtggtaaaaggctcagaaaaatcctgcgaagaaaaaaacttctgaggtaataaataggattatcccgtatcgaaggcctttttggacaggtggtgtgtggtggccttggtatgtgctttctc

SEQ ID NO: 2956 - DNA, 366 bp, Homo sapiens
acgaacctctcaggcctttcgaagaactttcataattcatgaaagcccagttctgaagattcacgtatccatctggagacctacaggaagaaagtgattgggttcctctggttcttgcctgcttcactgtggatgggaagaggtgacaacctcagtctccctttgggacctgtccaaggctaggcaaccaccttcaccttcacacagattgaggagacactggactttttacccattttctttaatcttcaatattaatattgtgtttacattgatgagaacaagagttaatgccctaccctctgctgggctgtttgtattgagttgcaatgtgaccagcgaaagctgcatttaataaatgaaagt

SEQ ID NO: 2957 - DNA, 287 bp, Homo sapiens
  misc_feature 168, 170: n = A,T,C or G
gttggaccttgcccatcttcactctagccttcgtatttgtgaaggactcagccaccttccttcttcaccccatgcttctcaccaaatttttgttgtcattgagggcacttggataactcaagttgatatttatagctgatcaatctatatgtgtcacagaactatgcntncctaaagtgatcttggctccttaatggtccttttggccccttggatagttaacagctgagtaattctaatctcttctgtgttttccttgccttaaccacaaattgtggtgctttttg

SEQ ID NO: 2958 - DNA, 128 bp, Homo sapiens
accagagggcggcaccgtggaaattctgttttccctgtagcatattgtgttggattgcattactggcagagaaaggacaaggtgccattcaagtcctagggtgggcttccagctgccttaatagaagt

SEQ ID NO: 2959 - DNA, 245 bp, Homo sapiens
acggccagggctattggttgaatgagtaggctgatggtttcgataataactagtatggggataaggggtgtaggtgtgccttgtggtaagaagtgggctagggcatttttaatcttagagcgaaagcctataatcactgtgcccgctcataaggggatggccatggctaggtttatagatagttgggtggttggtgtaaatgagtgaggcaggagtccgaggaggttagttgtggcaataaaaat

SEQ ID NO: 2960 - DNA, 455 bp, Homo sapiens
acaattttattttaacagatttcaagagtccattttttaaaaaatgagcaataaagaacctctatcagtgagacttctcattttatagcaaatacatttttgcagcttaaattttcttgaattcatatacgcttctgtcatttaaacaaacttccagagaaaactggtctctatatatttaagtaacaaatttgacaaaatacatatttatacatatatagatctctaatataaatattaaatttgaaaaaatcaaatgtgaagcagaaactgctatacaagtatattgtataatatttattttatacattaaagtatttggttgaatatacttcaattaggtttctaaaaaacaccattatctgcttcttagtaattgcgacattcttgaaaagcatgtgaaacgggtataaacttcaactctgtgcttaattcagaattcctgtttgttctcc

SEQ ID NO: 2961 - DNA, 391 bp, Homo sapiens
  misc_feature 37, 47, 87, 121, 122, 173, 351, 378: n = A,T,C or G
gtacaagctttttttttttttttttttttttttttgntttttctggnggcaggggtggcgttttaaacttgggggcttggaggggcntgaggtcaaagggcagcgggtctttcactggctnnaaagggaatagaaaggctgaaggaaaaccatatctggataaagtttaagtncactgagcatgacctaagactactgggagaaagttaatttccagcactcattttaccaaacctatgtaaccctgatcagggatccctgagttagctccagagctggaacagacagggcaaagggactgagcctccaaccctgagcagtggccgggcactcgacatgacaagctggganagcctgaaaaacgagctctcaaagganaaagaagggaaag

SEQ ID NO: 2962 - DNA, 329 bp, Homo sapiens
acagaacttttacatttttgaatattcctattacttttgattgtgtctgatgggaactgagttgttggcctttgtgaaatgaaatttttggctcttgagaaagaattcttatgaattgttatgcgaattttatatatttaaagagggagatctggggctgttatttttaaacactttttttcataatacatattccgagtagatatttataaaatatatgtttctttcattatgtgtttgtaaaattagagtttaaataaatatgctttgatgcatagttttgaactaatgtaacatgatttttcttttttaaaacagcctgaaaatgt

SEQ ID NO: 2963 - DNA, 435 bp, Homo sapiens
actattgacccagcgatgggggcttcgacatgggctttagggagtcataagtggagtccgtaaagaggtatctttactataaaagctattgtgtaagctagtcatattaagttgttggctcaggagtttgatagttcttgggcagtgagagtgagtagtagaatgtttagtgagcctagggtgttgtgagtgtaaattagtgcgatgagtaggggaagggagcctactagggtgtagaataggaagtatgtgcctgcgttcaggcgttctggctggttgcctcatcgggtgatgatagccaaggtggggataagtgtggtttcgaagaagatataaaatatgattagttctgtggctgtgaatgttataattaaggagatttgtagggagattagtatagagaggtagagtttttttcgtgatagtggttcactg

SEQ ID NO: 2964 - DNA, 301 bp, Homo sapiens
accattggtggccaattgatttgatggtaagggagggatcgttgacctcgtctgttatgtaaaggatgcgtagggatgggagggcgatgaggactaggatgatggcgggcaggatagttcagacggtttctatttcctgagcgtctgagatgttagtattagttagttttgttgtgagtgttaggaaaagggcatacaggactaggaagcagataaggaaaatgattatgagggcgtgatcatgaaaggtgataagctcttctatgataggggaagtagcgtcttgtagacctacttgcgc

SEQ ID NO: 2965 - DNA, 217 bp, Homo sapiens
acatatatatatataatatataatgtcacaagccactaagaagttaaaattgtgccaacattttctacaaactactctttatgtgacacatcaaagcattaaccacataaaatatgaactttttctgttcacactggaataaggcatctgaaagccctaaacactgctgaagtgaaaattagaagaaaaaactcaacattcacataacatcaaatgt

SEQ ID NO: 2966 - DNA, 306 bp, Homo sapiens
  misc_feature 200: n = A,T,C or G
actaaacattgtagacctgaaaacataaggaaacattcacttcatgtgtatgtcatatggacagactgagtgcaactaaaacgatggttgtttcatgttgaatttccctcggatgcagacgctgcccttcagtagatataaaggtagcacagttacatttacgacatcacagttaggttttaaaggattcatcagacctncacatgacaccgatacagcaggtccatggggcgcaggtggtgccacctgaggaaggtcaggaagacaggatgtgcatggctctgtggatctgcatgagctcttgct

SEQ ID NO: 2967 - DNA, 410 bp, Homo sapiens
acttctcctccattggtcccaggctaactcccctgttcctctgtggtgtctgtcagtccgtctgtcttctctttcctctgcccttcccacagggcagtatctgctgatggattcagtcctggtgtgtgattgttgtgatttgttcttccgtgcgcaaaaggaagagggctttttgagtcccttccaagtgagattgtaaatgtagaattttccactgttggatctagattttttttccttttttttgggggggtggggttacagagctgagaccttgtgcatgcatgtagaaaattgtaaaatgtaaatttttttttaatatataaaaagcttgtttctacagtttgcagtggatctaaacattacggcaattttaggatttttttcttaaacataggaactaaaactgt

SEQ ID NO: 2968 - DNA, 146 bp, Homo sapiens
  misc_feature 30, 108, 140: n = A,T,C or G
acgtgccaagcatcctcgtgcgaccgcganagcccggggagcgggggcttgccggccgtcgcactcatttacccggagacagggagaggctcttctgcgtgtagtggntgagcagagcctcatgcatcacggagcatganaagacg

SEQ ID NO: 2969 - DNA, 579 bp, Homo sapiens
  misc_feature 561: n = A,T,C or G
acttcagttggtgcacaaaatactgtcatttgctcaaagctggctgccaaatgtttggtgatgaaggcagaaatgaatggctcaaaacttgggagaagagcaaaacctgaaggggccctccagaacaatgatgggctttatgatcctgactgcgatgagagcgggctctttaaggccaagcagtgcaacggcacctccatgtgctggtgtgtgaacactgctggggtcagaagaacagacaaggacactgaaataacctgctctgagcgagtgagaacctactggatcatcattgaactaaaacacaaagcaagagaaaaaccttatgatagtaaaagtttgcggactgcacttcagaaggagatcacaacgcgttatcaactggatccaaaatttatcacgagtattttgtatgagaataatgttatcactattgatctggttcaaaattcttctcaaaaaactcagaatgatgtggacatagctgatgtggcttattattttgaaaaagatgttaaaggtgaatccttgtttcattctaagaaaatggacctgacagtnaatggggaacaactggat

SEQ ID NO: 2970 - DNA, 501 bp, Homo sapiens
accactatgtaggaggtttctatggaggctgcaatgaagccctgatgaagcttgagttggtccatcatgggcccatggcagttgcttttgaagtatatgatgacttcctccactacaaaaaggggatctaccaccacactggtctaagagaccctttcaacccctttgagctgactaatcatgctgttctgcttgtgggctatggcactgactcagcctctgggatggattactggattgttaaaaacagctggggcaccggctggggtgagaatggctacttccggatccgcagaggaactgatgagtgtgcaattgagagcatagcagtggcagccacaccaattcctaaattgtagggtatgccttccagtatttcataatgatctgcatcatttgtaaaggggaattggtatattcacagactgtagactttcagcagcaatctcagaagcttacaaatagatttccatgaagatatttgtcttcagaattaaaact

SEQ ID NO: 2971 - DNA, 517 bp, Homo sapiens
  misc_feature 44, 91, 184, 260, 271, 276, 289, 302, 332, 333, 359, 388,411, 413, 419, 421, 430, 459, 485, 494, 513: n = A,T,C or G
acaagcttttttttttttttttttttttttttttttttatgtanaaaagcaatttattccattttaagcacttacacagttagtcatgganagtaacaggcctgctggtgaaacaggtcacccaaaatggagatggcatcaaactagtggtcaaggactaactcctaaaaaaaaaaagcaactnttatcaaggattaatttaatttttaaaacaaatacaagttattgattcactcttctcaacttgacagtctacctgnggtataactgncaggnaaaaacatacatntttacaacttggnggtcccaagttaaaaaaaaaaaaaccaacnncaaaaaaaaacaccatttcacagacnggaaataaacaacatgaaaacagctcaanaaatacactaacgagcaaaaatntntgaatntntggggaaanaggaacgtgttgttttgacttaactgaanaaaccaagaggaaactggtctacgtntgaaaatgngcatcctggaaagtcaggngtca

SEQ ID NO: 2972 - DNA, 179 bp, Homo sapiens
  misc_feature 126, 155: n = A,T,C or G
gggagggccacgcaggtcgtggtcacctgccagcgactgtctcagactgggcagggaggctttggcatgacttaagaggaagggcagtcttgggcccgctatgcaggtcctggcaaacctggctgncctgtctccatccctgtccctcagggtancaccatggcaggactgggggaact

SEQ ID NO: 2973 - DNA, 533 bp, Homo sapiens
actccagcctaggtgacagagggagaccctgtctcaaaaagaaaagagacttacacgaggtcacatagctaataagtggcagatagggaagagaacccttgtccctctactttaaggccctattcgcttgccccattatcccatgctgcctctctaagagccagagaagtaggaggtagaaaaagagcatctctgcagctctgggactgatgatgtgaatgaactgggtagatggtaagtgtgtaactgggtgatcttggacatgggatggggtgggtgaggaggcttaccaatgctgagaggagtggaagccccaaccccagctaatgctagacaccagactccaaatttaaacacacagtggaaactggcaagaatgaaatactgacttcaatacagatttcaagagacatgacattagcactggtggagaatggcaggcctaaggttggaaaaggttcagggaaggaagatgaaggtctgccatgttctactgaggaggagtttttcaaacagtggggtgctgtctgcaa

SEQ ID NO: 2974 - DNA, 593 bp, Homo sapiens
ggattctgttgccttattgggaactgtgagacttatctggtatgagaagccagtaataaacctttgacctgttttaaccaatgaagattatgaatatgttaatatgatgtaaattgctatttaagtgtaaagcagttctaagttttagtatttgggggattggtttttattatttttttcctttttgaaaaatactgagggatcttttgataaagttagtaatgcatgttagattttagttttgcaagcatgttgtttttcaaatatatcaagtatagaaaaaggtaaaacagttaagaaggaaggcaattatattattcttctgtagttaagcaaacacttgttgagtgcctgctatgtgcacggcatgggcccatatgtgtgaggagcttgtctaattatgtaggaagcaatagatctcggtagttacgtattgggcagatacttactgtatgaatgaaagaacatcacagtaatcacaatatcagagctgaattatcctcagtgtagcttcttggaattcagtttctggaactagagatagagcatttattaaaaaaaactcctgttgagactgtgtcttatgaaactct

SEQ ID NO: 2975 - DNA, 411 bp, Homo sapiens
gtttaaaccagaaaacattacttttgaaaatggcacagatcttatcaacagcctgaatagcaatgaaaagatctgtgccattcaggctgttgataaggtcgatctgaaatcagaaatatccaacattgcacgagtatctttgtttattcctccacagactccgccagagacacctagtcctgatgaaacgtctgctccttgtcctaatattcatatcaacagcaccattcctggcattcacattttaaaaattatgtggaagtggataggagaactgcagctgtcaatagcctagggctgaatttttgtcagataaataaaataaatcattcatccttttttttgattataaaattttctaaaatgtattttagacttcctgtagggggcgatatactaaatgtatatagt

SEQ ID NO: 2976 - DNA, 117 bp, Homo sapiens
  misc_feature 98, 113: n = A,T,C or G
gaaaaacaaaacacttaactagaattctctaataaggtttatggtttagcttaaagagcacctttgtatttttattatcagatggggcaacatattgnatgaagcatatgtancact

SEQ ID NO: 2977 - DNA, 513 bp, Homo sapiens
  misc_feature 479, 480: n = A,T,C or G
acttggcagtctgtgctgccttaaaaaccccaactggacataaccctaggagaaaatcaccccaccccataaagacaaaattcccttttctcctcttccttgttcaaattccactgcttattccaccaacacccaaggaataacaagacccagcttacttctctcggtctcttatctgataaagctcacagcaatcttaacctctactacaatcaggaaattgagccctaatttctgggccagattctggaaagttgcaaaacatccttatgctgcgaggggcctgaggactccttcaaagatcaagggggcagtggaactggcagagactggcatgcctgccctgcaaggctgagacaaggggacctttctaagcaaaaacaccccaacatctgtcactgaaagtctaaccaggcaaaaccaaggagcagcaggcgccaaactagggctgtgcctgaaaggtgcacatctcccctgtnncaccataaaggcaagggagataaagagagccaa

SEQ ID NO: 2978 - DNA, 378 bp, Homo sapiens
ggagcccgacggcctgcggaggcaagaaactgctcaacaagtgcgccgcctcagccgcggaggagagcggggccggcaagaaggacaaggtgaccatagccgatgactactcagatccctttgatgccaagaatgatctcaagagcaaagcaggaaagggggagagtgctggctacatggagccctatgaggcacagaggatcatgacagaatttcagaggcaggaaagtgtccggtcccagcataaaggtatccagttatatgacaccccttacgaacctgaaggccaaagtgttgactcggactcggagagcacagtcagcccccgactgcgggagagtaagctgccccaggatgacgacaggcccgccgatgagt

SEQ ID NO: 2979 - DNA, 352 bp, Homo sapiens
accactgatgagacaaggaagcttaaactactggctcatcaggcatcagtgacagcatctgttctttggatatgacattttataataaggagtggagcaggtgctggaggattagtatacaataaatacatcttctctaagaactttaaagacgggaagtttttctccgcctagagaataatctgaaatcagaagagatggatttctgagaaagatttctcctagccctgttcctatctggagaaaaccagctggtgggtctaagagtaagaggagcaaccatgccagggagcaccctgactctggggcaaatgtgagcattagaggtaggcacatcctggctcataatcac

SEQ ID NO: 2980 - DNA, 311 bp, Homo sapiens
acaagactattatatgaacctcagaagcactgcacaaaaaaacactttccttcttttcagttcaaaagtcagtgcttattgcaattatatgcaaaattatttacttcatgaagttttatgataaacagtatgcaaaatgttttaaacatcaaaacaataaaaataatctggaacagaacatattcaacaataactaagcagaattagtaaacataaagtaaataacctgtgaataactatgcttgcctggttaacactgaaccagtttcaatacagcgaagaaaaaaaagagtggttacaggaatcctagt

SEQ ID NO: 2981 - DNA, 394 bp, Homo sapiens
  misc_feature 365, 366, 369, 371: n = A,T,C or G
ggccgtccgccagtggataatcgccctggccttggctgccctccttgttgtggacagggaagtgccagtggcagcaggaaagctccctttctcaagaatgcccatctgtgaacacatggtagagtctccaacctgttcccagatgtccaacctggtctgcggcactgatgggctcacatatacgaatgaatgccagctctgcttggcccggataaaaaccaaacaggacatccagatcatgaaagatggcaaatgctgatcccacaggagcacctcaagccatgaagtgtcagctggagaacagtggtgggcatggagaggatatgacatgaaataaaagatccagcccaaaaaaaaaaaaaaannaangngcttacctcggcgcgaccacgct

SEQ ID NO: 2982 - DNA, 289 bp, Homo sapiens
  misc_feature 277: n = A,T,C or G
accagcttccccatatgacctgtgaagacctcagcaacctggaatggctgagacaagaaacgctgtattttccgtgcacgggacacggtcaacttgtcttcctcagaaagttcatccatacccaggatggcaatgatatcctggagggatttgtagtcctatgagaaaaaagaagactgagttaagtattctcattcctttaatttggacaagctaacaaagggaaagttacatgctagggggcagagaaggtggtggtgttatgagggccctcagncaagaaagatca

SEQ ID NO: 2983 - DNA, 409 bp, Homo sapiens
acatactattctgcacttttccaccaaaagcagtggtgtgttatgcttgttatataaaaaaagttatatcctgtggcaggaaaaaccctttctctttcacttttactaaacaactggagaaaatgttcaagtctgtataaagttgcctataagctggaaagtgaacttgttcaatctccatttacattttagtgcattttttgacaattgtcacatttttaacaaaagtaagaaaatgcatatagcactaaagagtgtttcatcaaatgcttaagggattaaaaaatatggagcagagaacaaaatcattgtgaatggatgaactgttgtaaaatgaaaaaagtccaggcaaagttgttacaagtcttttgtcactttgatgagtcacagaaaatgaactttggatacc

SEQ ID NO: 2984 - DNA, 368 bp, Homo sapiens; identical to SEQ ID NO: 1752

SEQ ID NO: 2985 - DNA, 485 bp, Homo sapiens
acaaggtctctatccattaaagcatcttcaagtaacggtgttacggcataaatgtagtcttttcccatttcaccaatatattcaaacaagaaggaaagcgattttaacactccattttgaacattcagttcaggaactctgtattcattcattaaggcagggagtactttggaattcttagtcacaaaatatattttgtttacaaaaatttctgtaaaacaggttataacagtgtttaaagtctcagtttcttgcttggggaacttgtgtccctaatgtgtttagattgctagattgctaaggagctgatactttgacagtgtttttagacctgtgttactaaaaaaaagatgaatgtcctgaaaagggtgttgggagggtggttcaacaaagaaacaaagatgttatggtgtttagatttatggttgttaaaaatgtcatctcaagtcaagtcactggtctgtttgcatttgatacatttttgt

SEQ ID NO: 2986 - DNA, 542 bp, Homo sapiens
gcagacttgtttttgagtgttgagtagcagggacaaaataagggaatgttattttttaagaaaattcattttcattgttgtctccttccttttctgtgaaagtcctcatactgagaaatttgtatattttatattaaatcacttactattgatttttgttgtgattttcaaaggtggattcccacagataaaatcttggctattgcccaaaacatagtaaagggtcacgtgtgactttttataataggaagaaaattctgcctttgtgagtgcacatgtccacatttcatccctccttccctcaaaaccctagagaggggcattaaagaattgttgatgtatatgcaatgtctgttaagcatgcactatgtatttcatcctcatttattgggtctgggactgaagtttttagccagcatggacctaacctactttttgggataaaattctctgttttgttacaggcaaaattctggtatggcgtgaatgccatgggtcattctgaatatatttttttctgtaattttatcattacacgatgt

SEQ ID NO: 2987 - DNA, 66 bp, Homo sapiens
accccctaaatctattttattttttgagatggaatttcgctcttgttgcccaggatggagtgcaat

SEQ ID NO: 2988 - DNA, 456 bp, Homo sapiens
  misc_feature 342, 423: n = A,T,C or G
actttctccttgcttcactggccacagcatctccctccagccctcgctatgtgcctctgccatcttcacccatcatggagcagaggtgaggagaggcagcctgggaatatggagaccagtgaaggaccaggcctggagagcacagggtcctacctgggcatccagcagaggagcccctaaaggccaggagcaccccaagaggagggagggcagccagcctccattgacggcgagcctccagccctctcctactttgatcaccatttctctccaggctttctgcctccgagatgtggcaccatagtgcggtgccctgtggcttcaccgccctacttccacctncgcccagcctgtaatgtttatataagcagcctcaaggaccaagaaccatctgcgaaaggacacacacaggaaattcataanagaaatctgaatggataaaaccatgaaaaaaag

SEQ ID NO: 2989 - DNA, 115 bp, Homo sapiens
gattgactatgggacttgtgtatgctgtgtgaaaggtctcttctatcactgttctaatgatgatgaggacaactgtgctgacaacccatgttcttgcagccagtctcactgttgt

SEQ ID NO: 2990 - DNA, 297 bp, Homo sapiens
  misc_feature 286, 292: n = A,T,C or G
acggccagggctattggttgaatgagtaggctgatggtttcgataataactagtatggggataaggggtgtaggtgtgccttgtggtaagaagtgggctagggcatttttaatcttagagcgaaagcctataatcactgcgcccgctcataaggggatggccatggctaggtttatagatagttgggtggttggtgtaaatgagtgaggcaggagtccgaggaggttagttgtggcaataaaaatgattaaggatactagtataagagatcaggttcgtcctttantgttgngtatg

SEQ ID NO: 2991 - DNA, 369 bp, Homo sapiens
acaagtttgaatttacgtattcctggccaaataaccaaggtgaagaaaggtaaggggaagaaaaaaaagaaaaaaaaagggctgtatccaaacaaaaacaacccgagatcagagaattggtctatatttcattaagataaattgtttcaaatgaaacatttggtaattgagaatactactttaatatctgagctacttagggccctttcctttttaaaaaataggaccaaacaatttaagagttaaagacacactatcctttccccacccagtgcaatacctgtaactttcttttggggttccaaatgttcactgcttcttattgcaattcttttgccacatccattagaatatgaagtcccagtcagt

SEQ ID NO: 2992 - DNA, 411 bp, Homo sapiens
actgaatgtcatctgcatggtcggcccccacccatttggggtagacgggcatccgagagggatgggaaaacaggtaggcgtaggtcttggcactcttggcattggctctgtgctgggctagggcaatctcggtgggcaccaggaagaggacatcggtctcaaagtccaccacagtcttcttcttattctcctgggatgggtcctgggcccaggactcggtgtagacatcaaaggtcgtcttggcgcctctgagccccttggtgattgtgaactcactgaccagcttgtagaagtcctcctccgtgactttcttgttgtccttgttgatggcaggcatgtcgatgctggcgaagatgtggccgtccatgttgttggtgcctgctatatagtcgatgtcggcggcgttggcgt

SEQ ID NO: 2993 - DNA, 509 bp, Homo sapiens
actgaagatcagcgatgcaaactcattagggaggagatggtctgaactgagttggagacatagtctagtttaatttttgacttcatagtaattgcaggaccagttctagacatccatttttcagcttcctctagtttttgaacttgcaaacaaaggagaacttcttctcacaagattcatccttccatttcttgaatcctgagcatgaagtcaggcttgcacagtagccagcattagcactgctcggggatccagtgtcccaggacttgtaggagaccagggacccactactccagtgccagcggcggttcttttttgggtcatggaggccgatccagacattgctgtcatcagtgctactctccttaatcagtgaggccacgaaggcaccctccgcctgggtgagcacagacaccaggttgcctgaattcatgttctggcaatagagatctgcatcaacccaggtctcagggtcttcattaaagtagtagcagtaggagcgataggca

SEQ ID NO: 2994 - DNA, 331 bp, Homo sapiens
acgagtggattgtcagatatgccttgatggaagagagtttgttgcggatgaaatcagccagggccttggtctccttttcagactctgcggcaggtccacagtaagtttcatcacaggggtttcgagaggctccaatttcacaccaaccagcatcaaaatttctgttggggtctgtgccaatgcagctagatccagtatgggtggagcgagtctttctccaaaatcggctcttggtccaggtgtagatgtagccatcaatattgagcacaggcaggacataaaagtctaacttgtcgagaagctctgtcacttggatctcacgtccataggt

SEQ ID NO: 2995 - DNA, 304 bp, Homo sapiens
actatctggtttgagagtgcccttgaaaatttcatactgcttagagtttcctttatttccgaacaaagaaactagtatgtgtcctgtaaccttttttccagacagtgtgacagataccttatacctccaacgtgcaaaattactggcatcaccagtgtctagataaaatttctggcccacatcatttgttttcccaggatatctatcagcatagtgacccatctgtgggcagcctccacttggacaagggaaacacttgtttgcagtgaagacgttgtaagaggcacaggggaatccagcaaag

SEQ ID NO: 2996 - DNA, 207 bp, Homo sapiens
acactcaaactttatttggttgcctggatggggccagagaggaggacaagaagggtgtcaaagggtcagctcagtaggggtgattcagggtgtgctccatgatggtcagaagcgccagccacgtctccttggctgtggggatgatctgggaggctggcagcaggaagccatagcgcccagtgtcccggagctcgaaggtgaaggagt

SEQ ID NO: 2997 - DNA, 531 bp, Homo sapiens
ggaactgccacgatgctgccactttggactctttcactgctgctgggagcagtagcaggaaaagaagtttgctacgaaagactcggctgcttcagtgatgactccccatggtcaggaattacggaaagacccctccatatattgccttggtctccaaaagatgtcaacacccgcttcctcctatatactaatgagaacccaaacaactttcaagaagttgccgcagattcatcaagcatcagtggctccaatttcaaaacaaatagaaaaactcgctttattattcatggattcatagacaagggagaagaaaactggctggccaatgtgtgcaagaatctgttcaaggtggaaagtgtgaactgtatctgtgtggactggaaaggtggctcccgaactggatacacacaagcctcgcagaacatcaggatcgtgggagcagaagtggcatattttgttgaatttcttcagtcggcgttcggttactcacctttccaacgtgcatgtcattggccacagcctgggtgccca

SEQ ID NO: 2998 - DNA, 471 bp, Homo sapiens
acagcctgttcctcgtggcagcccacgagtttggccacgccatggggctggagcactcccaagaccctggggccctgatagcacccatttacacctacaccaagaacttccgtctgtcccaggatgacatcaagggcattcaggagctctatggggcctctcctgacattgaccttggcaccggccccacccccacgctgggtcctgtcactcctgagatctgcaaacaggacattgtatttgatggcatcgctcagatccgtggtgagatcttcttcttcaaggaccggttcatttggcggactgtgacgccacgtgacaagcccatggggcccctgctggtggccacattctggcctgagctcccggaaaagattgatgcggtatacgaggccccacaggaggagaaggctgtgttctttgcagggaatgaatactggatctactcagccagcaccctggagcgagggt

SEQ ID NO: 2999 - DNA, 410 bp, Homo sapiens
ccaaaaggtgggccatctggatttctttccaaatggaggaaaggaaatgcccggatgtaagaaaaatgtcctttcaaccattactgatattgatggaatatgggaaggaattggtggctttgtgtcttgcaatcacctaagaagcttcgagtattactcaagcagcgtcctcaaccctgatggcttcctgggctatccctgtgcctcctacgatgagtttcaggagagtaagtgtttcccttgtccagctgaaggatgccccaaaatggggcactatgctgaccaatttaaggggaaaacaagtgctgtggaacaaacctttttcctgaacacaggagagagtggtaactttactagttggagatataaggtatcagtcacactttctggaaaagagaaagtgaatgggt

SEQ ID NO: 3000 - DNA, 224 bp, Homo sapiens
acacccacacctattcatactcgtgctccggctcggcaatcacctgtagcagcaaaaacaaagagtgtgaggccttcatttgcaactgcgaccgcaacgctgccatctgcttttcaaaagctccatataacaaggcacacaagaacctggacaccaagaagtattgtcagagttgaatatcacctctcaaaagcatcacctctatctgcctcatctcacactgt

SEQ ID NO: 3001 - DNA, 483 bp, Homo sapiens
cggaactgccacgatgctgccactttggactctttcactgctgctgggagcagtagcaggaaaagaagtttgctacgaaagactcggctgcttcagtgatgactccccatggtcaggaattacggaaagacccctccatatattgccttggtctccaaaagatgtcaacacccgcttcctcctatatactaatgagaacccaaacaactttcaagaagttgccgcagattcatcaagcatcagtggctccaatttcaaaacaagtagaaaaactcgctttattattcatggattcatagacaagggagaagaaaactggctggccaatgtgtgcaagaatctgttcaaggtggaaagtgtgaactgtatctgtgtggactggaaaggtggctcccgaactggatacacacaagcctcgcagaacatcaggatcgtgggagcagaagtggcatattttgttgaatttcttcagtcggcgttcgg

SEQ ID NO: 3002 - DNA, 521 bp, Homo sapiens
  misc_feature 363, 400, 473, 518: n = A,T,C or G
gagaaatcaaacccatgccatctacaaaaacaccctctccttggtcaatgatttcatcatcagagacaccatcctcaacatcaacttccaatgtgcctacccactggacatgaaagtcagcctccaagctgccttgcagcccattgtaagttccctgaacgtcagtgtggacgggaatggagagttcattgtcaggatggccctcttccaagaccagaactacacgaatccttacgaaggggatgcagttgaactgtctgttgagtccgtgctgtatgtgggtgccatcttggaacaaggggacacctcccggtttaacctggtgttgaggaactgctatgccacccccactgaagacaaggntgaccttgtgaagtatttcatcatcagaaacagctgntcaaatcaacgtgattccaccatccacgtggaggagaatgggcagtcctcggaaagccgggttctcagttcanatgttcatgtttgctggacattatgacctaattttcctgcattgngag

SEQ ID NO: 3003 - DNA, 331 bp, Homo sapiens; identical to SEQ ID NO: 2994

SEQ ID NO: 3004 - DNA, 207 bp, Homo sapiens
  misc_feature 63, 70, 94, 125, 144, 149, 166, 191: n = A,T,C or G
gtacaagctttttttttttttttttttttttttttttattttttttttttttttttttttttnaactgcncaaaggctgtattgcaggggaggngggagggggcaggcaaaacgctctttttttngggtcttggggccccggancaaancccagggatgggctgantgaggggcttggcaccctggggaanctgcaaatgaaaaacc

SEQ ID NO: 3005 - DNA, 459 bp, Homo sapiens
ggcatattttgttgaatttcttcagtcggcgttcggttactcaccttccaacgtgcatgtcattggccacagcctgggtgcccacgctgctggggaggctggaaggagaaccaatgggaccattggacgcatcacagggttggacccagcagaaccttgctttcagggcacacctgaattagtccgattggaccccagcgatgccaaatttgtggatgtaattcacacggatggtgcccccatagtccccaatttggggtttggaatgagccaagtcgtgggccacctagatttctttccaaatggaggagtggaaatgcctggatgtaaaaagaacattctctctcagattgtggacatagacggaatctgggaagggactcgagactttgcggcctgtaatcacttaagaagctacaaatattacactgatagcatcgtcaaccctgatggctttgc

SEQ ID NO: 3006 - DNA, 390 bp, Homo sapiens
acagagtcttttgcttcctcccacccctagggggaaaaactgctttgtgctttgggaagttgtctctgaaacccggggacagaggacgcaggacagactaggagggagccgggaggatgggctgcagctgtggaggagggtttcagaggagagaggtcggagagcagaggcctgagaagccagaggcaggtggagagagggtggaaagtgagcagcgggctgggctggagccgcacacgctctcctcccatgttaaatagcacctttagaaaaattcacaagtccccatccacaaaaaaaaaaaaaaaagaaagaaaaatatcaaggaataaaaatagactttgaacaaaaaggaacatttgctggcctgggggggcatctcaatttcta

SEQ ID NO: 3007 - DNA, 290 bp, Homo sapiens
actcattccaatgaatttgactcagatgtggatgttggggacttgcagatggttaaatttatttggtataacaatgtgatcaacccaactttacctagagtgggagcatccaagattatagtggagacaaatgttggaaaacagttcaacttctgtagtccagaaaccgtcagggaggaagttctgctcaccctcacaccgtgttaggagactactgttatttgaccaatgaattgacttctaataaaatctagtggcgatgcaaaaaaaaaaaaaaaaaaaaaaaaaaa

SEQ ID NO: 3008 - DNA, 511 bp, Homo sapiens
gctttcaccgccattctcgacaccttggacatcttcctggagatcgtcaccaaccctgatggctttgccttcacgcacagcacgaatcgcatgtggcgcaagactcggtcccacacagcaggctccctctgtattggcgtggaccccaacaggaactgggacgctggctttgggttgtccggagccagcagtaacccctgctcggagacttaccacggcaagtttgccaattccgaagtggaggtcaagtccattgtagactttgtgaaggaccatgggaacatcaaggccttcatctccatccacagctactcccagctcctcatgtatccctatggctacaaaacagaaccagtccctgaccaggatgagctggatcagctttccaaggctgctgtgacagccctggcctctctctacgggaccaagttcaactatggcagcatcatcaaggcaatttatcaagccagtggaagcactattgactggacctacagccagggcatcaagt

SEQ ID NO: 3009 - DNA, 331 bp, Homo sapiens
acctatggacgtgagatccaagtgacagagcttctcgacaagttagacttttatgtcctgcctgtgctcaatattgatggctacatctacacctggaccaagagccgattttggagaaagactcgctccacccatactggatctagctgcattggcacagaccccaacagaaattttgatgctggttggtgtgaaattggagcctctcgaaacccctgtgatgaaacttactgtggacctgccgcagagtctgaaaaggagaccaaggccctggctgatttcatccgcaacaaactctcttccatcaaggcatatctgacaatccactcgt

SEQ ID NO: 3010 - DNA, 411 bp, Homo sapiens
acgccaacgccgccgacatcgactatatagcaggcaccaacaacatggacggccacatcttcgccagcatcgacatgcctgccatcaacaaggtcaacaagaaagtcacggaggaggacttctacaagctggtcagtgagttcacaatcaccaaggggctcagaggcgccaagacgacctttgatgtctacaccgagtcctgggcccaggacccatcccaggagaataagaagaagactgtggtggactttgagaccgatgtcctcttcctggtgcccaccgagattgccctagcccagcacagagccaatgccaagagtgccaagacctacgcctacctgttttcccatccctctcggatgcccgtctaccccaaatgggtgggggccgaccatgcagatgacattcagt

SEQ ID NO: 3011 - DNA, 499 bp, Homo sapiens
acgcatccctcaactagcacctccagctagcgattctacagtaaccaaattggactttgatcttgagcctgaacctcctccagccccaccacgagcttcttctcttggagaaatagatgaatcttctgaattaagagttttggatataccaggacaggattcagagactgtttttgatattcagaatgacagaaatagtatacttccaaaatctcaatctgaatacaagcctgatactcctcagtcaggcctagaatatagtggtattcaagaacttgaggacagaagatctcagcaaaggtttcagtttaatctacaagatttcaggtgttgtgctgtcttgggaagaggacattttggaaaggtgcttttagctgaatataaaaacacaaatgagatgtttgctataaaagccttaaagaaaggagatattgtggctcgagatgaagtagacagcctgatgtgtgaaaaaagaatttttgaaactgtgaatagtgta

SEQ ID NO: 3012 - DNA, 493 bp, Homo sapiens
actatctggtttgagagtgcccttgaaaatttcatattgcttagagtttcctttatttccgaacaaagaaactagtatgtgtcctgtaaccttttttccagacagtgtgacagataccttatacctccaacgtgcaaaattactggcatcaccagtgtctagataaaatttctggcccacatcatttgttttcccaggatatctatcagcatagtgacccatctgtgggcagcctccacttggacaagggaaacacttgtttgcagtgaagacgttgtaagaggcacaggggaatccagcaaagccatcagggttgacgatgctatcagtgtaatatttgtagcttcttaagtgattacaggccgcaaagtctcgagtcccttcccagattccgtctatgtccacaatctgagagagaatgttctttttacatccaggcatttccactcctccatttggaaagaaatctaggtggcccacgacttggctcatt

SEQ ID NO: 3013 - DNA, 263 bp, Homo sapiens
actcattccaatgaatttgactcagatgtggatgttggggacttgcagatggttaaatttatttggtataacaatgtgatcaacccaactttacctagagtgggagcatccaagattatagtggagacaaatgttggaaaacagttcaacttctgtagtccagaaaccgtcagggaggaagttctgctcaccctcacaccgtgttaggagactactgttatttgaccaatgaattgacttctaataaaatctagtggtgatac

SEQ ID NO: 3014 - DNA, 285 bp, Homo sapiens
  misc_feature 51, 93, 133, 146, 191, 194, 231, 242, 255, 256: n = A,T,C or G
acaagcttttttttttttttttttttttttttttttttttcgggaattttntgagagatctttattctttattcaggatgtgggatcgatcancattgccagctgggccttggttctagtggcttgctatggnctcctcaatccantcgatgaaggcggaaactcgagtgaacaccgggggcttccaaatnaanttgcagccaaagccaaaaacaaagctggtcaaaccgnggacctgccanccaccattctttnnggggcaattgaggggtcctccaaaatcac

SEQ ID NO: 3015 - DNA, 103 bp, Homo sapiens
  misc_feature 45, 72, 86: n = A,T,C or G
acaagctttttttttttttttttttttttttttttacatagttgncactttattatattattttccttctgngacctttccaagtntgaaacagtcccaacct

SEQ ID NO: 3016 - DNA, 85 bp, Homo sapiens
gctccggctgctcagttccctcctccttgtggccgttgcctcaggctatggcccaccttcctctcactcttccagccgcgttgtc

SEQ ID NO: 3017 - DNA, 503 bp, Homo sapiens
  misc_feature 432: n = A,T,C or G
caagaatctgttcaaggtggaaagtgtgaactgtatctgtgtggactggaaaggtggctcccgaactggatacacacaagcctcgcagaacatcaggatcgtgggagcagaagtggcatattttgttgaatttcttcagtcggcgttcggttactcaccttccaacgtgcatgtcattggccacagcctgggtgcccacgctgctggggaggctggaaggagaaccaatgggaccattggacgcatcacagggttggacccagcagaaccttgctttcagggcacacctgaattagtccgattggaccccagcgatgccaaatttgtggatgtaattcacacggatggtgcccccatagtccccaatttggggtttggaatgagccaagtcgtgggccacctagatttctttccaaatggaggagtggaaantgcctggatgtaaaaagaacattctctctcagattgtggacatagacggaatctgggaagggactcgagac

SEQ ID NO: 3018 - DNA, 338 bp, Homo sapiens
ggaacgctttgtgttctcatcggagctgcatgggaagtctgcatacagcaaagtgacctgcatgcctcaccttatggaaaggatggtgggctctggcctcctgtggctggccttggtctcctgcattctgacccaggcatctgcagtgcagcgaggttatggaaaccccattgaagccagttcgtatgggctggacctggactgcggagctcctggcaccccagaggctcatgtctgttttgacccctgtcagaattacaccctcctggatgaacccttccgaagcacagagaactcagcagggtcccaggggtgcgataaaaacatgagcggctggt

SEQ ID NO: 3019 - DNA, 521 bp, Homo sapiens
cggaactgccacgatgctgccactttggactctttcactgctgctgggagcagtagcaggaaaagaagtttgctacgaaagactcggctgcttcagtgatgactccccatggtcaggaattacggaaagacccctccatatattgccttggtctccaaaagatgtcaacacccgctttctcctatatactaatgagaacccaaacaactttcaagaagttgccgcagattcatcaagcatcagtggttccaatttcaaaacaaatagaaaaactcgctttattattcatggattcatagacaagggagaagaaaactggctggccaatgtgtgcaagaatctgttcaaggtggaaagtgtgaactgtatctgtgtggactggaaaggtggctcccgaactggatacacacaagcctcgcagaacatcaggatcgtgggagcagaagtggcatattttgttgaatttcttcagtcggcgttcggttactcaccttccaacgtgcatgtcattggccacagcc

SEQ ID NO: 3020 - DNA, 557 bp, Homo sapiens
actatctggtttgagagtgcccttgaaaatttcatactgcttagagtttcctttatttccgaacaaagaaactagtatgtgtcctgtaaccttttttccagacagtgtgacagataccttatacctccaacgtgcaaaattactggcgtcaccagtgtctagataaaatttctggcccacatcatttgttttcccaggatatctatcagcatagtgacccatctgtgggcagcctccacttggacaagggaaacacttgtttgcagtgaagacgttgtaagaggcacaggggaatccagcaaagccatcagggttgacgatgctatcagtgtaatatttgtagcttcttaagtgattacaggccgcaaagtctcgagtcccttcccagattccgtctatgtccacaatctgagagagaatgttctttttacatccaggcatttccactcctccatttggaaagaaatctaggtggcccacgacttggctcattccaaaccccaaattggggactatgggggcaccatccgtgtgaattacatccacaaatttggcat

SEQ ID NO: 3021 - DNA, 65 bp, Homo sapiens
agggactcgagactttgcggcctgtaatcacttaagaagctacaaatattacactgatagcatcg

SEQ ID NO: 3022 - DNA, 500 bp, Homo sapiens
gctggccaatgtgtgcaagaatctgttcaaggtggaaagtgtgaactgtatctgtgtggactggaaaggtggctcccgaactggatacacacaagcctcgcagaacatcaggatcgtgggagcagaagtggcatattttgttgaatttcttcagtcggcgttcggttactcaccttccaacgtgcatgtcattggccacagcctgggtgcccgcgctgctggggaggctggaaggagaaccaatgggaccattggacgcatcacagggttggacccagcagaaccttgctttcagggcacacctgaattagtccgattggaccccagcgatgccaaatttgtggatgtaattcacacggatggtgcccccatagtccccaatttggggtttggaatgagccaagtcgtgggccacctagatttctttccaaatggaggagtggaaatgcctggatgtaaaaagaacattctctctcagattgtggacatagacggaatct

SEQ ID NO: 3023 - DNA, 460 bp, Homo sapiens
tggaaaggtggctcccgaactggatacacacaagcctcgcagaacatcaggatcgtgggagcagaagtggcatattttgttgaatttcttcagtcggcgttcggttactcaccttccaacgtgcatgtcattggccacagcctgggtgcccacgctgctggggaggctggaaggagaaccaatgggaccattggacgcatcacagggttggacccagcagaaccttgctttcagggcacacctgaattagtccgattggaccccagcgatgccaaatttgtggatgtaattcacacggatggtgcccccatagtccccaatttggggtttggaatgagccaagtcgtgggccacctagatttctttccaaatggaggagtggaaatgcctggatgtaaaaagaacattctctctcagattgtggacatagacggaatctgggaagggactcgagactttg

SEQ ID NO: 3024 - DNA, 422 bp, Homo sapiens
acccattcactttctcttttccagaaagtgtgactgataccttatatctccaactagtaaagttaccactctctcctgtgttcaggaaaaaggtttgttccacagcacttgttttccccttaaattggtcagcatagtgccccattttggggcatccttcagctggacaagggaaacacttactctcctgaaactcatcgtaggaggcacagggatagcccaggaagccatcagggttgaggacgctgcttgagtaatactcgaagcttcttaggtgattgcaagacacaaagccaccaattccttcccatattccatcaatatcagtaatggttgaaaggacatttttcttacatccgggcatttcctttcctccatttggaaagaaatccagatggcccaccttttggctcattccgaaa

SEQ ID NO: 3025 - DNA, 472 bp, Homo sapiens
actatctggtttgagagtgcccttgaaaatttcatactgcttagagtttcctttatttccgaacaaagaaactagtatgtgtcctgtaaccttttttccagacagtgtgacagataccttatacctccaacgtgcaaaattactggcatcaccagtgtctagataaaatttctggcccacatcatttgttttcccaggatatctatcagcatagtgacccatctgtgggcagcctccacttggacaagggaaacacttgtttgcagtgaagacgttgtaagaggcacaggggaatccagcaaagccatcagggttgacgatgctatcagtgtaatatttgtagcttcttaagtgattacaggccgcaaagtctcgagtcccttcccagattccgtctatgtccacaatctgagagagaatgttctttttacatccaggcatttccactcctccatttggaaagaaatctagg

SEQ ID NO: 3026 - DNA, 494 bp, Homo sapiens
  misc_feature 486: n = A,T,C or G
gacggaactgccacgatgctgccactttggactctttcactgctgctgggagcagtagcaggaaaagaagtttgctacgaaagactcggctgcttcagtgatgactccccatggtcaggaattacggaaagacccctccatatattgccttggtctccaaaagatgtcaacacccgcttcctcctatatactaatgagaacccaaacaactttcaagaagttgccgcagattcatcaagcatcagtggctccaatttcaaaacaaatagaaaaactcactttattattcatggattcatagacaagggagaagaaaactggctggccaatgtgtgcaagaatctgttcaaggtggaaagtgtgaactgtatctgtgtggactggaaaggtggctcccgaactggatacacacaagcctcgcagaacatcaggatcgtgggagcagaagtggcatattttgttgaatttcttcagtcggcgttcggntactcacc

SEQ ID NO: 3027 - DNA, 594 bp, Homo sapiens
  misc_feature 531, 574: n = A,T,C or G
actgttattaaaagcatattgtattatagagctattcagatattttaaatataaagatgtattgtttccgtaatatagacgtatggaatatatttaggtaatagatgtattacttggaaagttctgctttgacaaactgacaaagtctaaatgagcacatgtatcccagtgagcagtaaatcaatggaacatcccaagaagaggataaggatgcttaaaatggaaatcattctccaacgatatacaaattggacttgttcaactgttggatatatgctaccaataaccccagccccaacttaaaattcttacattcaagctcctaagagttcttaatttataactaattttaaaagagaagtttcttttctggttttagtttgggaataatcattcattaaaaaaaatgtattgtggtttatgcgaacagaccaacctggcattacagttggcctctccttgaggtgggcacagcctggcagtgtggccaggggtggccatgtaagtcccatcaggacgtagtcatgcctnctgcatttcgctacccgagttagtaacagtgcagattccacgntcttgttccgatactctgag

SEQ ID NO: 3028 - DNA, 521 bp, Homo sapiens
  misc_feature 493, 494, 510, 512: n = A,T,C or G
actttctatgagaagcgtatggccacagaagttgctgctgacgctctgggtgaagaatggaagggttatgtggtccgaatcagtggtgggaacgacaaacaaggtttccccatgaagcagggtgtcttgacccatggccgtgtccgcctgctactgagtaaggggcattcctgttacagaccaaggagaactggagaaagaaagagaaaatcagttcgtggttgcattgtggatgcaaatctgagcgttctcaacttggttattgtaaaaaaaggagagaaggatattcctggactgactgatactacagtgcctcgccgcctgggccccaaaagagctagcagaatccgcaaacttttcaatctctctaaagaagatgatgtccgccagtatgttgtaagaaagcccttaaataaagaaggtaagaaacctaggaccaaagcacccaagattcagcgtcttgttactccacgtgtcctgcagcacaaacggnngcgtattgctctgaanancagcgtacc

SEQ ID NO: 3029 - DNA, 336 bp, Homo sapiens
  misc_feature 86, 100, 192, 220, 237, 255, 286, 291, 313, 317, 322: n = A,T,C or G
acaagctttttttttttttttttttttttttggctttgacttgctttattgagcctgtgtgggagcagggagcaagctttggccanagccaagggtgcanaggggagagctgggctggcgctgctcatggagtcgtaggagacaaaaggtggcattataagtccagcgggctgagctccctggggacagcancatgcggggacccccactccgagaaggncagcgtgtcctctttgngtcttttcccatacctangcctggtcagcatgttgatgtatttacgganatcanctgcatactgggccatctgctntggngtggnattgtcccctgggt

SEQ ID NO: 3030 - DNA, 125 bp, Homo sapiens
acactcaaactttatttggttgcctggatggggccagagaggaggacaagaagggtgtcaaagggtcagctcagtaggggtgattcagggtgtgctccatgatggtcagaagcgccagccacgtc

SEQ ID NO: 3031 - DNA, 445 bp, Homo sapiens
actgtcactcagtctgtaaactacccccagagggtggtttgtttcctcattccttaaaaaaaaacaaaaacaaataaacaaacaaaaaagaagtttactaaatttaaacactgacatcctatgaagatgccagtctttacaggcgtttgtaaaagtagactgtggggagtatgttacactaatacaaagttttacaaatgaatacaagtgaaatatataaattacaatgaaatagaggaagattgtggctctgtcctgggttggttcttttagcagtcatattgctgttggtgagagcagcaaaagccacatatgcctccaagcactccatttattacttgaataagacacaagatgaattcaattccaccaagagccaagaggatagaaaacagagatacattccattccacaatgtgcttgggttcagtgcactcggaccatg

SEQ ID NO: 3032 - DNA, 574 bp, Homo sapiens
  misc_feature 536: n = A,T,C or G
ctgctggggaggctggaaggagaaccaatgggaccattggacgcatcacagggttggacccagcagaaccttgctttcagggcacacctgaattagtccgattggaccccagcgatgccaaatttgtggatgtaattcacacggatggtgcccccatagtccccaatttggggtttggaatgagccaagtcgtgggccacctagatttctgtccaaatggaggagtggaaatgcctggatgtaaaaagaacattctctctcagattgtggacatagacggaatctgggaagggactcgagactttgcggcctgtaatcacttaagaagctacaaatattacactgatagcatcgtcaaccctgatggctttgctggattcccctgtgcctcttacaacgtcttcactgcaaacaagtgtttcccttgtccaagtggaggctgcccacagatgggtcactatgctgatagatatcctgggaaaacaaatgatgtgggccagaaattttatctagacactggtgatgccagtaatttncacgttggaggtataaggtatctgtcacactgtctgga

SEQ ID NO: 3033 - DNA, 120 bp, Homo sapiens
acttggtgccgtgcagtgaggcaagttctttcacagtagctttagccagggcattcaactcagcattgttctcaccgagtttgtaagcatatgagtaagggtagatcatcatttgggagt

SEQ ID NO: 3034 - DNA, 331 bp, Homo sapiens; identical to SEQ ID NO: 2994

SEQ ID NO: 3035 - DNA, 149 bp, Homo sapiens
actgtgaggtttgatttgtgtgacagaatctggcttccagaagtcaatctgggtcgtgctggccaactcgcggattatgttaatgtgattttcatcttcaacgttaacacggaacaccttctcgccttcaaagtgctcaccaccatgat

SEQ ID NO: 3036 - DNA, 507 bp, Homo sapiens
gtggacatggcacttaccaacagagattgctgatttgctccttaagcaagagattcactgccgctaagcatggctcagaccaactcgttcttcatgctgatctcctccctgatgttcctgtctctgagccaaggccaggagtcccagacagagctgcctaatccccgaatcagttgcccagaaggcaccaatgcctatcgctcctactgctactactttaatgaagaccctgagacctgggttgatgcagatctctattgccagaacatgaattcaggcaacctggtgtctgtgctcacccaggcggagggtgccttcgtggcctcactgattaaggagagtagcactgatgacagcaatgtctggattggcctccatgacccaaaaaagaaccgccgctggcactggagtagtgggtccctggtctcctacaagtcctgggacactggatccccgagcagtgctaatgctggctactgtgcaagcctgacttcatgctcaggattc

SEQ ID NO: 3037 - DNA, 331 bp, Homo sapiens
acgagtggattgtcagatatgccttgatggaagagagtttgttgcggatgaaatcagccagggccttggtctccttttcagactctgcggcaggtccacagtaagtttcatcacaggggtttcgagaggctccaatttcacaccaaccagcatcaaaatttctgttggggtctgtgccaatgcagctagatccagtatgggtggagcgagtctttctccaaaatcggctcttggtccaggtgtagatgtagccatcaatattgagcacaggcaggacataaaagtctaacttgttgagaagctctgtcacttggatctcacgtccataggt

SEQ ID NO: 3038 - DNA, 296 bp, Homo sapiens
  misc_feature 168, 200, 221, 243, 246, 283: n = A,T,C or G
gtacaagcttttttttttttttttttttttttttttttatctgagagatctttattctttattcaggatgtgggatcgatcagcactgccagctgggccttggttctagtggcttgctatggtctcctcaatccagtccgatgaaggcggagactcgagtgaaaccgngggcttccaaatgaagttgcagccaaagccanaaacaaagctggtcacaccgnggacctgccagccaccatcctntgnggggcagttgaggggtcctccaaagtcaccgttgcanccggagcggatgt

SEQ ID NO: 3039 - DNA, 199 bp, Homo sapiens
  misc_feature 197: n = A,T,C or G
actgtgaggtttgatttgtgtgacagaatctggcttccagaagtcaatctgggtcgtgctggccaactcgcggattatgttaatgtgattttcatcttcaacgttaacacggaacaccttctcgccttcaaagtgctcaccaccatgatgagcagatgccagggccacagtcaccagaaccaagagtgccaacattntg

SEQ ID NO: 3040 - DNA, 392 bp, Homo sapiens
ggagaacatcataacccatgaaggataaaagccccaaatggtggtaactgataatagcactaatgctttaagatttggtcacactctcacctaggtgagcgcattgagccagtggtgctaaatgctacatactccaactgaaatgttaaggaagaagatagatccaattaaaaaaaattaaaaccaatttaaaaaaaaaagaacacaggagattccagtctacttgagttagcataatacagaagtcccctctactttaacttttacaaaaaagtaacctgaactaatctgatgttaaccaatgtatttatttctgtggttctgtttccttgttccaatttgacaaaacccactgttcttgtattgtattgcccagggggagctatcactgt

SEQ ID NO: 3041 - DNA, 411 bp, Homo sapiens
acgccaacgccgccgacatcgactatatagcaggcaccaacaacatggacggccacatcttcgccagcatcgacatgcctgccatcaacaagggcaacaagaaagtcacggaggaggacttctacaagctggtcagtgagttcacaatcaccaaggggctcagaggcgccaagacgacctttgatgtctacaccgagtcctgggcccaggacccatcccaggagaataagaagaagactgtggtggactttgagaccgatgtcctcttcctggtgcccaccgagattgccctagcccagcacagagccaatgccaagagtgccaagacctacgcctacctgttttcccatccctctcggatgcccgtctaccccaaatgggtgggggccgaccatgcagatgacattcagt

SEQ ID NO: 3042 - DNA, 230 bp, Homo sapiens
acaacaagtgggaaacgatagaggcttggactcaacaagtcgccactgagaatccagccctcatctctcgcagtgttatcggaaccacatttgagggacgcgctatttacctcctgaaggttgacaaagctggacaaaataagcctgccattttcatggactgtggtttccatgccagagagtggatttctcctgcattctgccagtggtttgtaagagaggctgttcgt

SEQ ID NO: 3043 - DNA, 331 bp, Homo sapiens; identical to SEQ ID NO: 2994

SEQ ID NO: 3044 - DNA, 331 bp, Homo sapiens; identical to SEQ ID NO: 3037

SEQ ID NO: 3045 - DNA, 493 bp, Homo sapiens
  misc_feature 455: n = A,T,C or G
acttgatgccctggctgtaggtccagtcaatagtgcttccactggcttgataaattgccttgatgatgctgccatagttgaacttggtcccgtagagagaggccagggctgtcacagcagccttggaaagctgatccagctcatcctggtcagggactggttctgttttgtagccatagggatacatgaggagctgggagtagctgtggatggagatgaaggccttgatgttcccatggtccttcacaaagtctacaatggacttgacctccacttcggaattggcaaacttgccgtggtaagtctccgagcaggggttactgctggctccggacaacccaaagccagcgtcccagttccacaaaaaaacagaaaaaaattagccaggcacggtggcaggcacctgtagtcccagttacgcaggaggctgaagtgggaggatcacttgagcccangaggtaggggctgcagtgagctgtgattgcaccacagt

SEQ ID NO: 3046 - DNA, 331 bp, Homo sapiens
acctatggacgtgagatccaagtgacagagcttctcgacaagttagacctttatgtcctgcctgtgctcaatattgatggctacatctacacctggaccaagagccgattttggagaaagactcgctccacccatactggatctagctgcattggcacagaccccaacagaaattttgatgctggttggtgtgaaattggagcctctcgaaacccctgtgatgaaacttactgtggacctgccgcagagtctgaaaaggagaccaaggccctggctgatttcatccgcaacaaactctcttccatcaaggcatatctgacaatccactcgt

SEQ ID NO: 3047 - DNA, 81 bp, Homo sapiens
acacccaagccgtgcaaaacattcgggttgttggggcggagacagctttcttaatacaagcactgtcgacgcagctagggt

SEQ ID NO: 3048 - DNA, 466 bp, Homo sapiens
  misc_feature 284, 448, 450: n = A,T,C or G
acacaagggtcagtttcttcaattcatgagcagtcagaacaggagatgcttaggaaggaatcgtggctggtgcctcttctccatgctcatcccataccccagtgacaggataccgcttccctgaagttaaaaacatgcaccacacttccggtaaaggctggagccacagagggcacctagcaagcttgctttcaaggtcccatcaacaaatgagaagggcagccgaggacagattgacagaaaccccactatgttgcttttcttttttttttttttttcctganacagagtcttgctctgttgcccaggctggagtgcaatggcacaatctcaactcactgcaacctccaccccctgagttcgagcaattctcctgccttggcctcccgagtagctgggattacaggcgcctgccaccatgcctggctaatttttgtatttttagtananacggagtttcagcatt

SEQ ID NO: 3049 - DNA, 331 bp, Homo sapiens
acgagtggattgtcagatatgcctcgatggaagagagtttgttgcggatgaaatcagccagggccttggtctccttttcagactctgcggcaggtccacagtaagtttcatcacaggggtttcgagaggctccaatttcacaccaaccagcatcaaaatttctgttggggtctgtgccaatgcagccagatccagtatgggtggagcgagtctttctccaaaatcggctcttggtccaggtgtagatgtagccatcaatattgagcacaggcaggacataaaagtctaacttgttgagaagctctgtcacttggatctcacgtccataggt

SEQ ID NO: 3050 - DNA, 331 bp, Homo sapiens; identical to SEQ ID NO: 3009

SEQ ID NO: 3051 - DNA, 478 bp, Homo sapiens
accaagcaatgaagaacaaattaaaaatctgctacaattggaggctcaagaacatctccagcttgatttttggaaatcacccaccaccccaggggagacagcccacgtccgagttcccttcgtcaacgtccaggcagtcaaagtgttcttggagtcccagggaattgcctattccatcatgattgaagacgtgcaggtcctgttggacaaagagaatgaagaaatgctttttaataggagaagagaacggagtggtaacttcaattttggggcctaccataccctggaagagatttcccaagaaatggataacctcgtggctgagcaccctggtctagtgagcaaagtgaatattggctcttcttttgagaaccggcctatgaacgtgctcaagttcagcaccggaggagacaagccagctatctggctggatgctgggatccatgctcgagagtgggttacacaagctacggcactt

SEQ ID NO: 3052 - DNA, 80 bp, Homo sapiens
actgataagcaacctgagaaatgtggtggaggctcagtttgatagccgggttcgtgcaacaggacacagttatgagaagt

SEQ ID NO: 3053 - DNA, 420 bp, Homo sapiens
acaggtgttccaggacgtagctggcaacatacttgattgccaggaaggtctcctcgcaggtagcccggatctgggattctggaaggagaaagccatatctgcctgtatctcgaagttcaaaggtgaaggaatatctgattccttggtcataagcccagtcgtcagagcccccagcagcaggatctgaaatgtgcaaacagcagtgaaaaaaaactttaaatctaggaaggagctttaaaaaattgccagtttcttttttcattacaaatgtttcactgtgcaaaatattttgagtaggccaattttctagtaaactggatcataaatgttatgggggctgttttaaaaaattactccaaccttattaaacgtatcaccacttcactttgtagaaatgatgtgtttaatacttcagaaagt

SEQ ID NO: 3054 - DNA, 491 bp, Homo sapiens
accaagcaatgaagaacaaattaaaaatctgctacaattggaggctcaagaacatctccagcttgatttttggaaatcacccaccaccccaggggagacagcccacgtccgagttcccttcgtcaacgtccaggcagtcaaagtgttcttggagtcccagggaattgcctattccatcatgattgaagacgtgcaggtcctgttggacaaagagaatgaagaaatgctttttaataggagaagagaacggagtggtaacttcaattttggggcctaccataccctggaagagatttcccaagaaatggataacctcgtggctgagcaccctggtctagtgagcaaagtgaatattggctcttcttttgagaaccggcctatgaacgtgctcaagttcagcaccggaggagacaagccagctatctggctggatgctgggatccatgctcgagagtgggttacacaagctacgggactttggacagcaaata

SEQ ID NO: 3055 - DNA, 118 bp, Homo sapiens
acctgggcctcatcggctacagagattcggagcacctgatgccccacaaagtcctccttgccaaagacagcccccaacaggacactcaacaccagcaacccccgcatgctgctgccgg

SEQ ID NO: 3056 - DNA, 534 bp, Homo sapiens
  misc_feature 463: n = A,T,C or G
actatctggtttgagagtgcccttgaaaatttcatactgcttagagtttcctttatttccgaacaaagaaactagtatgtgtcctgtaaccttttttccagacagtgtgacagataccttatacctccaacgtgcaaaattactggcatcaccagtgtctagataaaatttctggcccacatcatttgttttcccaggatatctatcagcatagtgacccatctgtgggcagcctccacttggacaagggaaacacttgtttgcagtgaagacgttgtaagaggcacaggggaatccagcaaagccatcagggttgacgatgctatcagtgtaatatttgtagcttcttaagtgattacaggccgcaaagtctcgagtcccttcccagattccgtctatgtccacaatctgagagagaatgttctttttacatccaggcatttccactcctccatttggaaangaaatctaggtggcccacgacttggctcattccaaaccccaaattggggactatgggggcaccatccgtgt

SEQ ID NO: 3057 - DNA, 222 bp, Homo sapiens
gcggcatcagccctcgggccgtgtggcagttccgcaaaatgatcaagtgcgtgatcccggggagtgaccccttcttggaatacaacaactacggctgctactgtggcttggggggctcaggcacccccgtggatgaactggacaagtgctgccagacacatgacaactgctatgaccaggccaagaagctggacagctgtaaatttctgctggacaacccgt

SEQ ID NO: 3058 - DNA, 489 bp, Homo sapiens
acctgtggaagttacttcaaccctggaagtagggactttccagcagtcccatattctggatgggatttcaatgatggtaaatgtaaaactggaagtggagatatcgagaactacaatgatgctactcaggtcagagattgtcgtctgactggtcttcttgatcttgcactggagaaggattacgtgcgttctaagattgccgaatatatgaaccatctcattgacattggtgttgcagggttcagacttgatgcttccaagcacatgtggcctggagacataaaggcaattttggacaaactgcataatctaaacagtaactggttccctgcaggaagtaaacctttcatttaccaggaggtaattgatctgggtggtgagccaattaaaagcagtgactactttggtaatggccgggtgacagaattcaagtatggtgcaaaactcggcacagttattcgcaagtggaatggagagaagatgtcttac

SEQ ID NO: 3059 - DNA, 415 bp, Homo sapiens
cgagaagtgataacccaaaggctaactagatgaaaaagaaaacaaaactgagtttactcggatatctgagctaatgtagaacatcaaacagaaggacccatggcagtataaagcaatgaagcaatggagtattatctcacaaatataaaaccactataagacaaacatttgattatcatttgacaaatacctaggtataactggaattttcatgtttgaagttctaatattaagtttagaattataatgatctacagttgtatcttgattctatgttgtctggaaaaaatatggaattatataaaaagggatgcttttatatatttttcttttccccagaattacttagattaattagatgtatagtaaaatattgttaaatgtcagtttatccatcttatccttctcagcaggt

SEQ ID NO: 3060 - DNA, 213 bp, Homo sapiens
acacatatggcccgggggctacaacaatctatcctgctgctgggggctctgacgactgggcttatgaccaaggaatcagatattccttcacctttgaacttcgagatacaggcagatatggctttctccttccagaatcccagatccgggctacctgcgaggagaccttcctggcaatcaagtatgttgccagctacgtcctggaacacctgt

SEQ ID NO: 3061 - DNA, 199 bp, Homo sapiens
actgtgaggtttgatttgtgtgacagaatctggcttccagaagtcaatctgggtcgtgctggccaactcgcggattatgttaatgtgattttcatcttcaacgttaacacggaacaccttctcgccttcaaagtgctcaccaccatgatgagcagatgccagggccacagtcaccagaaccaagagtgccaacattgtg

SEQ ID NO: 3062 - DNA, 207 bp, Homo sapiens; identical to SEQ ID NO: 2996

SEQ ID NO: 3063 - DNA, 182 bp, Homo sapiens
acacctaacagacctcctagaaaccttaccagaaaatggggactgggtagggaaggaaacttaaaagatcaacaaactgccagcccacggactgcagaggctgtcacagccagatggggtggccagggtgtcacaaacccaaagcaaagtttcaaaataatataaaatttaaaaagttttgt

SEQ ID NO: 3064 - DNA, 338 bp, Homo sapiens
acaaattaagtcttatgaatttaatctcataaaaaattaggtgcatagtcacactggctaacctaaaaatgctattttatctacagcctaaaataagaggcagttccaacactaaaaattaatcccagttttttttttacatgttttacaaaaaaaagtttgtgctcttaatcaaaaagatcgaggctaattcagcatgtaaaaaataaattttacaaagaacccaagataatatttttcaaacacacttttattttctttttttccttcctcacatacagaacttctccacataccacatttcttgcagctataaagtcacttgatgttggccgggt

SEQ ID NO: 3065 - DNA, 557 bp, Homo sapiens
actatttaatatatttctccatgaactttttgtgaaattcagatcgcagtgtgtcatttacaaatcttttgtctttcttctggtcatctacaccttttgcacagttcttgaagacaacgtcatcatcccaccttcttttaactttgaagttggcctgaggctgggatgggccagtgagattaaggagagggtttccgctcagaatgttttccatacgaatcctctcttcttcagctttttgttcttgttccttcctggcctgctcttcagctctttcttttttaattttttccagttctgcaagaagagctgcagtatcatcatcatcactttcttcttcaaaatcttcatcttcctcatctgttagagggtcatctgcatcaaggttggcggcaggaatctggtctaaccgtggcttttttgacactgaagaggaggttgtatgttctggggggaaacaaaaatcatttaacttagtaaaacaaatacttcatttcttaaaatgttttagggacctgtgagcacaaggagcccacattaaaagcattatccacagt

SEQ ID NO: 3066 - DNA, 520 bp, Homo sapiens
accgaccatagagcaagaatcaagattctgctaactcctgcacagccccgtcctcttcctttctgctagcctggctaaatctgctcattatttcagaggggaaacctagcaaactaagagtgataagggccctactacactggcttttttaggcttagagacagaaactttagcattggcccagtagtggcttctagctctaaatgtttgccccgccatccctttccacagtatccttcttccctcctcccctgtctctggctgtctcgagcagtctagaagagtgcatctccagcctatgaaacagctgggtctttggccataagaagtaaagatttgaagacagaaggaagaaactcaggagtaagcttctagaccccttcagcttctacacccttctgccctctctccattgcctgcaccccaccccagccactcaactcctgcttgtttttcctttggccataggaaggtttaccagtagaatccttgctaggttgatgtgggccatacattcctt

SEQ ID NO: 3067 - DNA, 154 bp, Homo sapiens
actgcagggagacctgccagggccagctgttgggcctcgcttcttcaccgccaaccaccctagtcacataaggtgggtaagtggggtccccacaactgagggctccagccaccaaagtggacagcagcagcgtccttatcatggtgtgtccgtg

SEQ ID NO: 3068 - DNA, 230 bp, Homo sapiens
acgaacagcctctcttacaaaccactggcagaatgcaggagaaatccactctctggcatggaaaccacagtccatgaaaatggcagacttattttgtccagctttgccaaccttcaggaggtaaatagcgcgtccctcaaatgtggttccgataacactgcgagagatgagggctggattctcagtggcgacttgttgagtccaagcctctatcgtttcccacttgttgt

SEQ ID NO: 3069 - DNA, 502 bp, Homo sapiens
  misc_feature 256, 257, 341, 353: n = A,T,C or G
actatctggtttgagagtgcccttgaaaatttcatactgcttagagtttcctttatttccgaacaaagaaactagtatgtgtcctgtaaccttttttccagacagtgtgacagataccttatacctccaacgtgcaaaattactggcatcaccagtgtctagataaaatttctggcccacatcatttgttttcccaggatatctatcagcatagtgacccatctgtgggcagcctccacttggacaagggaaacannttgtttgcagtgaagacgttgtaagaggcacaggggaatccagcaaagccatcagggttgacgatgctatcagtgtaatatttntagcttcttaantgattacaggccgcaaagtctcgagtcccttcccagattccgtctatgtccacaatctgagagagaatgttctttttacatccaggcatttccactcctccatttggaaagaaatctaggtggcccacgacttggctcattccaaaccc

SEQ ID NO: 3070 - DNA, 182 bp, Homo sapiens
  misc_feature 6: n = A,T,C or G
acaacntggaataaacaaaaaccctaacactggaagtgtaaacatgtctattgatgtgtatgccaatttcactggcatctagcttatgaggccaaataatcccaaagtgtcactttatataaatgtcttgattacagtatagaactttatagagtccataatacaaagtatcactacataaa

SEQ ID NO: 3071 - DNA, 535 bp, Homo sapiens
  misc_feature 508: n = A,T,C or G
acttcccagggtgggggccatatttctctgtgtcctactctgagcaacttctcagagatacgagggggctagggttttcccatctgggaaatggggtgaaagtctgcagattgttaaatgaaatatagaatcagagaaaaagaaaagtcagtgatataaatagatcatttcatagaaattagggtagatttttatttcaactactactggagaatttaataaaaggcattatttgaaaagtttttctaacatagatttagggttttttttttagagtggacacactacatttaaaagcaattattttgctattcagattttttattatctgaaaatgaaattatctgttttacttttcaaagctttgtgaaacaaacttgaagttatagggaggtaagccatctccaactctgcaggtcaaacgaaagtttgggaaatacttttgacatcccacaatacagaatgtcttaacatgagaattgaatttcatgatgtgtggttccatttnatagcggacaccaccccaatctcatgt

SEQ ID NO: 3072 - DNA, 335 bp, Homo sapiens
  misc_feature 247, 287, 302, 304, 316, 321, 322: n = A,T,C or G
acctatggacgtgagatccaagtgacagagcttctcaacaagttagacttttatgtcctgcctgtgctcaatattgatggctacatctacacctggaccaagagccgattttggagaaagactcgctccacccatactggatctagctgcattggcacagaccccaacagaaattttgatgctggttggtgtgaaattggagcctctcgaaacccctgtgatgaaacttactgtggacctgccgcanagtctgaaaaggagaccaaggccctggctgatttcatccncaacaaactctcttncntcaaggcatatntgacnntccactcgtacct

SEQ ID NO: 3073 - DNA, 499 bp, Homo sapiens
  misc_feature 223, 400: n = A,T,C or G
actcagaccttaagaatcttgattctaggatccgggcacagaagaaaaagaattagttccatcagggaggagtcagaggaatttgcccaatggctggggcatctcccttgacttacccataatgtctttctgcattagttccttgcacgtataaagcactctaatttggttctgatgcctgaagagaggcctagtttaaatcacaattccgaatctggggcantggaatcactgcttccagctggggcaggtgagatctttacgccttttataacatgccatccctactaataggatattgacttggatagcttgatgtctcatgacgagcggcgctctgcatccctcacccatgcctcctaactcagtgatcaaagcgaatattccatctgtggatagnacccctggcagtgttgtcagctcaacctggtgggttcagttctgtcctgaggcttctgctctcattcatttagtgctacgctgcacagttctacactgt

SEQ ID NO: 3074 - DNA, 298 bp, Homo sapiens
ctcaacaagttagacttttatgtcctgcctgtgctcaatattgatggctacatctacacctggaccaagagccgattttggagaaagactcgctccacccatactggatctagctgcattggcacagaccccaacagaaattttgatgctggttggtgtgaaattggagcctctcgaaacccctgtgatgaaacttactgtggacctgccgcagagtctgaaaaggagaccaaggccctggctgatttcatccgcaacaaactctcttccatcaaggcatatctgacaatccactcgt

SEQ ID NO: 3075 - DNA, 173 bp, Homo sapiens
gcaagatgaaactccttgtgctagctgtgctgctcacagtggccgccgccgacagcggcatcagccctcgggccgtggtggcagttccgcaaaatgatcaagtgcgtgatcccggggagtgaccccttcttggaatacaacaactacggctgctactgtggcttggggggctc

SEQ ID NO: 3076 - DNA, 488 bp, Homo sapiens
actatctggtttgagagtgcccttgaaaatttcatactgcttagagtttcctttatttccgaacaaagaaactagtatgtgtcctgtaaccttttttccagacagtgtgacagataccttatacctccaacgtgcaaaattactggcatcaccagtgtctagataaaatttctggcccacatcatttgttttcccaggatatctatcagcatagtgacccatctgtgggcagcctccacttggacaagggaaacacttgtttgcagtgaagacgttgtaagaggcacaggggaatccagcaaagccatcagggttgacgatgctatcagtgtaatatttgtagcttcttaagtgattacaggccgcaaagtctcgagtcccttcccagattccgtctatgtccacaatctgagagagaatgttctttttacatccaggcatttccactcctccatttggaaagaaatctaggtggcccacgacttggc

SEQ ID NO: 3077 - DNA, 300 bp, Homo sapiens
gctggattcccctgtgcctcttacaacgtcttcactgcaaacaagtgtttcccttgtccaagtggaggctgcccacagatgggtcactatgctgatagatatcctgggaaaacaaatgatgtgggccagaaattttatctagacactggtgatgccagtaattttgcacgttggaggtataaggtatctgtcacactgtctggaaaaaaggttacaggacacatactagtttctttgttcggaaataaaggaaactctaagcagtatgaaattttcaagggcactctcaaaccagatagt

SEQ ID NO: 3078 - DNA, 253 bp, Homo sapiens
cggctgctcagttccctcctccttgtggccgttgcctcaggctatggcccaccttcctctcgcccttccagccgcgttgtcaatggtgaggatgcggtcccctacagctggccctggcaggtttccctgcagtatgagaaaagtggaagcttctaccacacgtgtggcggtagcctcatcgcccccgactgggttgtgactgccggccactgcatctcgagctcctggacctaccaggtggtgttgggcgagt

SEQ ID NO: 3079 - DNA, 343 bp, Homo sapiens
acttgagcatggagatgaagtcaaaattggagaaactgtcttatcctttcacattcatcctggcagtgatacctgtgatggctgtgaaccagggcaggttagagcccaccttcgccttgataagaaagatgaatcttttgttggtccaacactaagtaaggaggaaaaagagttggaaagaagaaaagaattaaagaaaatacgagtaaaatatggtttacagaatacagaatacgaagatgaaaagacattgaagaatccaaaatataaagatagagctggaaaacgtagggagcaggttggaagtgaaggaactttccaaagagatgatgctcctgcatct

SEQ ID NO: 3080 - DNA, 411 bp, Homo sapiens
actgaatgtcatctgcatggtcggcccccacccatttggggtagacgggcatccgagagggatgggaaaacaggtaggcgtaggtcttggcactcttggcattggctctgtgctgggctagggcaatctcggtgggcaccaggaaaaggacatcggtctcaaagtccaccacagtcttcttcttattctcctgggatgggtcctgggcccaggactcggtgtagacatcaaaggtcgtcttggcgcctctgagccccttggtgattgtgaactcactgaccagcttgtagaagtcctcctccgtgactttcttgttgcccttgttgatggcaggcatgtcgatgctggcgaagatgtggccgtccatgttgttggtgcctgctatatagtcgatgtcggcggcgttggcgt

SEQ ID NO: 3081 - DNA, 331 bp, Homo sapiens; identical to SEQ ID NO: 3037

SEQ ID NO: 3082 - DNA, 528 bp, Homo sapiens
  misc_feature 489, 509: n = A,T,C or G
cgagaagtgacaggctatgtcctcgtggccatgaatgaattctctactctaccattgcccaacctccgcgtggtgcgagggacccaggtctacgatgggaagtttgccatcttcgtcgtgttgaactataacaccaactccagccacgctctgcgccagctccgcttgactcagctcaccgagattctgtcagggggtgtttatattgagaagaacgataagctttgtcacatggacacaattgactggagggacatcgtgagggaccgagatgctgagatagtggtgaaggacaatggcagaagctgtcccccctgtcatgaggtttgcaaggggcgatgctggggtcctggatcagaagactgccagacattgaccaagaccatctgtgctcctcagtgtaatggtcactgctttgggcccaaccccaaccagtgctgccatgatgagtgtgccgggggctgctcaggccctcaggacacagactgntttgcctgccggcacttcangacagtggagcctgtgtac

SEQ ID NO: 3083 - DNA, 287 bp, Homo sapiens
gtgcctcttacaacgtcttcactgcaaacaagtgtttcccttgtccaagtggaggctgcccacagatgggtcactatgctgatagatatcctgggaaaacaaatgatgtgggccagaaattttatctagacactggtgatgccagtaattttgcacgttggaggtataaggtatctgtcacactgtctggaaaaaaggttacaggacacatactagtttctttgttcggaaataaaggaaactctaagcagtatgaaattttcaagggcactctcaaaccagatagt

SEQ ID NO: 3084 - DNA, 331 bp, Homo sapiens
acgagtggattgtcagatatgccttgatggaagagagtttgttgcggatgaaatcagccagggccttggtctccttttcagactctgcggcaggtccacagtaagtttcatcacaggggtttcgagaggctccaatttcacaccaaccagcatcaaaatttctgttggggtctgtgccaatgcagctagatccagtatgggtggagcgagtctttctccaaaatcggctcttggtccaggtgtagatgtagccgtcaatattgagcacaggcaggacataaaagtctaacttgttgagaagctctgtcacttggatctcacgtccataggt

SEQ ID NO: 3085 - DNA, 492 bp, Homo sapiens
accttatgaggtagttgtaacctccttgaggttgtgcaaagtgtgttgaaactaccctatgtaagaggttttacatgaaaggaagttagccctggcccaaggtcaagttccatgtgggaacagagccaagacccggaaggaggaagggttgtccatggccagagctcgggtcggccagcctgcctcgcagtgcactcactggactcttgcctcctaggttttactacaatgtggagtcctgtggctctctgcgtcctgaaaccattgtcctgtcagccctctcaggattgaagaagaaactgagtgatttacaaactcaattaagccacgagatccagagtgatgtgctaaccataaattaactgcagcttgcctgcttcagcaaaaacggagattcaggccagcagctggatatgggggtctctcttcagactcttctcgtttctgagaatctagtctactgttggttgagcttcttggcaggacatcagt

SEQ ID NO: 3086 - DNA, 560 bp, Homo sapiens
  misc_feature 536: n = A,T,C or G
cgagcggccgcccggcaggtctcgtggaagtgacatcgtctttaaaccctgcgtggcaatccctgacgcaccgccgtgatgcccagggaagacagggcgacctggaagtccaactacttccttaagatcatccaactattggatgattatccgaaatgtttcattgtgggagcagacaatgtgggctccaagcagatgcagcagatccgcatgtcccttcgcgggaaggctgtggtgctgatgggcgagaacaccatgatgcgcaaggccatccgagggcacctggaaaacaacccagctctggagaaactgctgcctcatatccgggggaatgtgggctttgtgttcaccaaggaggacctcactgagatcagggacatgttgctggccaataaggtgccagctgctgcccgtgctggtgccattgccccatgtgaagtcactgtgccagcccagaacactggtctcgggcccgagaagacctcctttttccaggctttaggtatcaccactaaaatctccaggggcaccattgnaatcctgagtgatgtgcagctgat

SEQ ID NO: 3087 - DNA, 517 bp, Homo sapiens
ccagcagaaccttgctttcagggcacacctgaattagtccgattggaccccagcgatgccaaatttgtggatgtaattcacacggatggtgcccccatagtccccaatttggggtttggaatgagccaagtcgtgggccacctagatttctttccaaatggaggagtggaaatgcctggatgtaaaaagaacattctctctcagattgtggacatagacggaatctgggaagggactcgagactttgcggcctgtaatcacttaagaagctacaaatattacactgatagcatcgtcaaccctgatggctttgctggattcccctgtgcctcttacaacgtcttcactgcaaacaagtgtttcccttgtccaagtggaggctgcccacagatgggtcactatgctgatagatatcctgggaaaacaaatgatgtgggccagaaattttatctagacactggtgatgccagtaattttgcacgttggaggtataaggtatctgtcacactgtctggaa

SEQ ID NO: 3088 - DNA, 514 bp, Homo sapiens
acagaacaaagatgtttttatgaggtatcataaagctcatttgacacgacgtcttatattagacatctctgccgatagtgaaattgaagaaaacatggtagagtggctaagagaagttggtatgccagcggattatgtaaacaagcttgctagaatgtttcaggacataaaagtatctgaagatttgaaccaagcttttaaggaaatgcacaaaaataataaattggcattaccagctgattcagttaatataaaaattctgaatgctggcgcctggtcaagaagttctgagaaagtctttgtctcacttcctactgaactggaggacttgataccggaagtagaagaattctacaaaaaaaatcatagtggtagaaaattacattggcatcatctcatgtcaaatggaattataacatttaagaatgaagttggtcaatatgatttggaggtaaccacgtttcagctcgctgtattgtttgcatggaaccaaagacccagagagaaaatcagc

SEQ ID NO: 3089 - DNA, 331 bp, Homo sapiens; identical to SEQ ID NO: 3009

SEQ ID NO: 3090 - DNA, 519 bp, Homo sapiens
gcagaaccttgctttcagggcacacctgaattagtccgattggaccccagcgatgccaaatttgtggatgtaattcacacggatggtgcccccatagtccccaatttggggtttggaatgagccaagtcgtgggccacctagatttctttccaaatggagaagtggaaatgcctggatgtaaaaagaacattctctctcagattgtggacatagacggaatctgggaagggactcgagactttgcggcctgtaatcacttaagaagctacaaatattacactgatagcatcgtcaaccctgatggctttgctggattcccctgtgcctcttacaacgtcttcactgcaaacaagtgtttcccttgtccaagtggaggctgcccacagatgggtcactatgctgatagatatcctgggaaaacaaatgatgtgggccagaaattttatctagacactggtgatgccagtaattttgcacgttggaggtataaggtatctgtcacactgtctggaaaaaag

SEQ ID NO: 3091 - DNA, 207 bp, Homo sapiens
acactcaaactttatttggttgcccggatggggccagagaggaggacaagaagggtgtcaaagggtcagctcagtaggggtgattcagggtgtgctccatgatggtcagaagcgccagccacgtctccttggctgtggggatgatctgggaggctggcagcaggaagccatagcgcccagtatcccggagctcgaaggtgaaggagt

SEQ ID NO: 3092 - DNA, 565 bp, Homo sapiens
accaagcaatgaagaacaaattaaaaatctgctacaattggaggctcaagaacatctccagcttgatttttggaaatcacccaccaccccaggggagacagcccacgtccgagttcccttcgtcaacgtccaggcagtcaaagtgttcttggagtcccagggaattgcctattccatcatgattgaagacgtgcaggtcctgttggacaaagagaatgaagaaatgctttttaataggagaagagaacggagtggtaacttcaattttggggcctaccataccctggaagagatttcccaagaaatggataacctcgtggctgagcaccctggtctagtgagcaaagtgaatattggctcttcttttgagaaccggcctatgaacgtgctcaagttcagcaccggaggagacaagccagctatctggctggatgctgggatccatgctcgagagtgggttacacaagctacggcactttggacagcaaataagattgtttctgattatggaaaggacccatccatcacttccattctggacgccctggatatcttcctcctgcca

SEQ ID NO: 3093 - DNA, 334 bp, Homo sapiens
gctttgtgttctcatcggagctgcatgggaagtctgcatacagcaaagtggcctgcatgcctcaccttatggaaaggatggtgggctctggcctcctgtggctggccttggtctcctgcattctgacccaggcatctgcagtgcagcgaggttatggaaaccccattgaagccagttcgtatgggctggacctggactgcggagctcctggcaccccagaggctcatgtctgttttgacccctgtcagaattacaccctcctggatgaacccttccgaagcacagagaactcagcagggtcccaggggtgcgataaaaacatgagcggctggta

SEQ ID NO: 3094 - DNA, 190 bp, Homo sapiens
ctcatgtatccctatggctacaaaacagaaccagtccctgaccaggatgagctggatcagctttccaaggctgctgtgacagccctggcctctctctacgggaccaagttcaactatggcagcatcatcaaggcaatttatcaagccagtggaagcactattgactggacctacagccagggcatcaagt

SEQ ID NO: 3095 - DNA, 331 bp, Homo sapiens; identical to SEQ ID NO: 2994

SEQ ID NO: 3096 - DNA, 230 bp, Homo sapiens
acgaacagcctctcttacaaaccactggcagaatgcaggagaaatccactctctggcatggaaaccacagtccatgaaaatggcaggcttattttgtccagctttgccaaccttcaggaggtaaatagcgcgtccctcaaatgtggttccgataacactgcgagagatgagggctggattctcagtggcgacttgttgagtccaagcctctatcgtttcccacttgttgt

SEQ ID NO: 3097 - DNA, 461 bp, Homo sapiens
gtggaagttacttcaaccctggaagtagggactttccagcagtcccatattctggatgggatttcaatgatggtaaatgtaaaactggaagtggagatatcgagaactacaatgatgctactcaggtcagagattgtcgtctgactggtcttcttgatcttgcactggagaaggattacgtgcgttctaagattgccgaatatatgaaccatctcattgacattggtgttgcagggttcagacttgatgcttccaagcacatgtggcctggagacataaaggcaattttggacaaactgcataatctaaacagtaactggttccctgcaggaagtaaacctttcatttaccaggaggtaattgatctgggtggtgagccaattaaaagcagtgactactttggtaatggccgggtgacagaattcaagtatggtgcaaaactcggcacagttattcgcaag

SEQ ID NO: 3098 - DNA, 480 bp, Homo sapiens
gcgagctgagtggttgtgtggtcgcgtctcggaaactggtagcgcttgcagcatggctgaccaactgactgaagagcagattgcagaattcaaagaagctttttcactatttgacaaagatggtgatggaactataacaacaaaggaattgggaactgtaatgagatctcttgggcagaatcccacagaagcagagttacaggacatgattaatgaagtagatgctgatggtaatggcacaattgacttccctgaatttctgacaatgatggcaagaaaaatgaaagacacagacagtgaagaagaaattagagaagcattccgtgtgtttgataaggatggcaatggctatattagtgctgcagaacttcgccatgtgatgacaaaccttggagagaagttaacagatgaagaagttgatgaaatgatcagggaagcagatattgatggtgatggtcaagtaaactatgaagagtttgt

SEQ ID NO: 3099 - DNA, 331 bp, Homo sapiens
acctatggacgtgagatccaagtgacagagcttctcaacaagttagacttttatgtcctgcctgtgctcaatattgatggctacatctacacctggaccaagagccgattttggagaaagactcgctccacccatactggatctagctgcattggcacagaccccaacagaaattttgatgctggttggtgtgaaattggagcctctcgaaacccctgtgatgaaacttactgtggacctgccgcagagtctgaaaaggagaccaaggccctggctgatttcatccgcaacaaactctcttccatcaaggcatatctgacaatccactcgt

SEQ ID NO: 3100 - DNA, 331 bp, Homo sapiens
acctatggacgtgagatccaagtgacagagcttctcgacaagttagacttttatgtcctgcctgtgctcaatattgatggctacatctacacctggaccaagagccgattttggagaaagactcgctccacccatactggatctagctgcattggcacagaccccaacagaaattttgatgctggttggtgtgaaattggagcctctcgaaacccctgtgatgaaacttactgtggacccgccgcagagtctgaaaaggagaccaaggccctggctgatttcatccgcaacaaactctcttccatcaaggcatatctgacaatccactcgt

SEQ ID NO: 3101 - DNA, 331 bp, Homo sapiens
acctatggacgtgagatccaagtgacagagcttctcaacaagttagacttttatgtcctgcctgtgctcaatattgatggctacatctacacctggaccaagagccgattttggagaaaggctcgctccacccatactggatctagctgcattggcacagaccccaacagaaattttgatgctggttggtgtgaaattggagcctctcgaaacccctgtgatgaaacttactgtggacctgccgcagagtctgaaaaggagaccaaggccctggctgatttcatccgcaacaaactctcttccatcaaggcatatctgacaatccactcgt

SEQ ID NO: 3102 - DNA, 89 bp, Homo sapiens
accaagcaatgaagaacaaattaaaaatctgctacaattggaggctcaagaacatctccagcttgatttttggaatcacccaccacccc

SEQ ID NO: 3103 - DNA, 340 bp, Homo sapiens
caaatattacactgatagcatcgtcaaccctgatggctttgctggattcccctgtgcctcttacaacgtcttcactgcaaacaagtgtttcccttgtccaagtggaggctgcccacagatgggtcactatgctgatagatatcctgggaaaacaaatgatgtgggccagaaattttatctagacactggtgatgccagtaattttgcacgttggaggtataaggtatctgtcacactgtctggaaaaaaggttacaggacacatactagtttctttgttcggaaataaaggaaactctaagcagtatgaaattttcaagggcactctcaaaccagatagt

SEQ ID NO: 3104 - DNA, 410 bp, Homo sapiens
ccgccgtggcctgcgcaccgacatcgatgcgacctgcacgccccgccgcgcaagttcgaaccaacgtggcctcaaccagatttggaatgtcaaaaagcagagtgtctatttgatgaatttgaggaaatctggaactttgggccacccaggctctctagatgagaccacctatgaaagactagcagaggaaacgctggactctttagcagagttttttgaagaccttgcagacaagccatacacgtttgaggactatgatgtctcctttgggagtggtgtcttaactgtcaaactgggtggagatctaggaacctatgtgatcaacaagcagacgccaaacaagcaaatctggctatcttctccatccagtggacctaagcgttatgactggactgggaaaaactgggtgt

SEQ ID NO: 3105 - DNA, 475 bp, Homo sapiens
accatgaaagataaacttaaaacatcaataacttaaataagaattaacattacttaaggcataatgtttcacatcaacaaacaaaattcattataataaaataaaacagggtgtctggggaaagctaggggaaaataagttagctgcagattcttgggttgtggagtgagtgttcaagtcttcggagtttgggtttgcttgtccaggtggtccatggaatcctgaacccacttctgcttggggtcagcacagatctccttggccacaatggtcttgaagatcacagcttctttgggacacttgctgctggtgattcttctatagctcgcgagcctctgcactgagatcttcctattggtgaagttataacagcaggtgactggggcattgattgcatctggctgagcgagcccttggggaatgaaggtggctgctatgagcagcaggcacagaagggcggcagagactttcatgc

SEQ ID NO: 3106 - DNA, 335 bp, Homo sapiens
  misc_feature 318: n = A,T,C or G
acgagtggattgtcagatatgccttgatggaagagagtttgttgcggatgaaatcagccagggccgcccgggcaggtcttttcagactctgcggcaggtccacagtaagtttcatcacaggggtttcgagaggctccaatttcacaccaaccagcatcaaaatttctgttggggtctgtgccaatgcagctagatccagtatgggtggagcgagtctttctccaaaatcggctcttggtccaggtgtagatgtagccatcaatattgagcacaggcaggacataaaagtctaacttgtcgagaagctctgtcacttgnatctcacgtccataggt

SEQ ID NO: 3107 - DNA, 508 bp, Homo sapiens
cggaactgccacgatgctgccactttggactctttcactgctgctgggagcagtagcaggaaaagaagtttgctacgaaagactcggctgcttcagtgatgactccccatggtcaggaattacggaaagacccctccatatattgccttggtctccaaaagatgtcaacacccgcttcctcctatatactaatgagaacccaaacaactttcaagaagttgccgcagattcatcaagcatcagtggctccaatttcaaaacaaatagaaaaactcgctttattattcatggattcatagacaagggagaagaaaactggctggccaatgtgtgcaagaatctgttcaaggtggaaagtgtgaactgtatctgtgtggactggaaaggtggctcccgaactggatacacacaagcctcgcagaacatcaggatcgtgggagcagaagtggcatattttgttgaatttcttcagtcggcgttcggttactcaccttccacgtgcatgtca

SEQ ID NO: 3108 - DNA, 539 bp, Homo sapiens
  misc_feature 481, 499: n = A,T,C or G
gacggaactgccacgatgctgccactttggactctttcactgctgctgggagcagtagcaggaaaagaagtttgctacgaaagactcggctgcttcagtgatgactccccatggtcaggaattacggaaagacccctccatatattgccttggtctccaaaagatgtcaacacccgcttcctcctatatactaatgagaacccaaacaactttcaagaagttgccgcagattcatcaagcatcagtggctccaatttcaaaacaaatagaaaaactcgctttattattcatggattcatagacaagggagaagaaaactggctggccaatgtgtgcaagaatctgttcaaggtggaaagtgtgaactgtatctgtgtggactggaaaggtggctcccgaactggatacacacaagcctcgcagaacatcaggatcgtgggagcagaagtggcatattttgttgaatttcttcagtcggcgntcggttactcaccttccnacgtgcatgtcattggccacagcctgggtgcccacgctgc

SEQ ID NO: 3109 - DNA, 193 bp, Homo sapiens
actgtgaggtttgatttgtgtgacagaatctggcttccagaagtcaatctgggtcgtgctggccaactcgcggattatgttaatgtgattttcatcttcaacgttaacacggaacaccttctcgccttcaaagtgctcaccaccatgatgagcagatgccagggccacagtcaccagaaccaagagtgccaac

SEQ ID NO: 3110 - DNA, 224 bp, Homo sapiens
acacccacacctattcatactcgtgctctggctcgacaatcacctgtagcagcaaaaacaaagagtgtgaggccttcatttgcaactgcgaccgcaacgctgccatctgcttttcaaaagctctatataacaaggcacacaagaacctggacaccaagaagtattgtcagagttgaatatcacctctcaaaagcatcacctctatctgcctcatctcacactgt

SEQ ID NO: 3111 - DNA, 401 bp, Homo sapiens
  misc_feature 110: n = A,T,C or G
cggccgaggttagaaattgagatgcccccccaggccagcaaatgttcctttttgttcaaagtctatttttattccttgatatttttctttctttttttttttttttttgnggatggggacttgtgaatttttctaaagatgctatttaacatgggaggagagcgtgtgcggctccagcccagcccgctgctcactttccaccctctctccacctgcctctggcttctcaggcctctgctctccgacctctctcctctgaaaccctcctccacagctgcagcccatcctcccggctccctcctagtctgtcctgcgtcctctgtccccgggtttcagagacaacttcccaaagcacaaagcagtttttccccctaggggtgggaggaagcaaaagactctgt

SEQ ID NO: 3112 - DNA, 505 bp, Homo sapiens
accttagccgatccctgggaatggttatggaacagtagggcttgtttccatcctttttagagtgaagagatagaaaattagggctacctagtgtgggttctttttcagaactatgtattttctcctcactgcatgatgggtaaaaatgccctgggttgaaacaagaaacattatctttccacaccactgactaaaacacctgccagtggtttctttaggctccaccttttgctccgtaaactgtagactttcagactgaaatctaatcttaagtgacctcaattaaggtattttcacaaaaggctacttatagtgcagcattattgccttaaatcagaaagccctgggaagaggataaaagatatagaaatgagaaggctctgaagttataggcatttcttgctgtttaatagttacattatcacaaaaacaagccctattcatgattgaagactatggaaatagtgacttcttgaggaggcgccaaactttcctagaactgggt

SEQ ID NO: 3113 - DNA, 472 bp, Homo sapiens
  misc_feature 370: n = A,T,C or G
acacaaatgaattgaatattggatcagaatttaccctaacttgaagagtaaaaagttatcaaagtttcaccttacatggctttattgaaataacattccatcgaaaattccaataaaaattggaatatattatgagcactgccaattgctcattttgtctgatattaacagattatgcatttcctcagagaagcagtaggtcccatatatacagacatatatatggctctggtttgaaagagaagacaattttgtctagtattatgatttatcactgtgctatcaatcaaaaaaaccaagtaagaaatacaattaaaacaacattgaaagggaaaaatttttaaatctcacatcttcaaggaatattttntacagcatatcatttgaaaaaggagaatgaatactgttcatggtccacatgtattaaacaaaaaacatgtcaattacttggtgcaaacacacagaacctggt

SEQ ID NO: 3114 - DNA, 347 bp, Homo sapiens
actgaagatcagcgatgcaaactcattagggaggagatggtctgaactgagttggagacatagtctagtttaatttttgacttcatagtaattgcaggaccagttctagacatccatttttcagcttcctctagtttttgaacttgcaaacaaaggagaacttcttctcacaagattcatccttccatttcttgaatcctgagcatgaagtcaggcttgcacagtagccagcattagcactgctcggggatccagtgtcccaggacttgtaggagaccagggacccactactccagtgccagcggcggttcttttttgggtcatggaggccaatccagacattgctg

SEQ ID NO: 3115 - DNA, 206 bp, Homo sapiens
aggcacgcggagtgtgaggccacgcatgagcggacgctaaccccctccccagccacaaagagtctacatgtctagggtctagacatgttcagctttgtggacctccggctcctgctcctcttagcggccaccgccctcctgacgcacggccaagaggaaggccaagtcgagggccaagacgaagacatcccaccaatcacctgcgt

SEQ ID NO: 3116 - DNA, 527 bp, Homo sapiens
accaagcaatgaagaacaaattaaaaatctgctacaattggaggctcaagaacatctccagcttgatttttggaaatcacccaccaccccaggggagacagcccacgtccgagttcccttcgtcaacgtccaggcagtcaaagtgttcttggagtcccagggaattgcctattccatcatgattgaagacgtgcaggtcctgttggacaaagagaatgaagaaatgctttttaataggagaagagaacggagtggtaacttcaattttggggcctaccataccctggaagagatttcccaagaaatggataacctcgtggctgagcaccctggtctagtgagcaaagtgaatattggctcttcttttgagaaccggcctatgaacgtgctcaagttcagcaccggaggagacaagccagctatctggctggatgctgggatccatgctcgagagtgggttacacaagctacggcactttggacagcaaataagattgtttctgattatggaaaggacccatccatca

SEQ ID NO: 3117 - DNA, 397 bp, Homo sapiens
  misc_feature 34, 60, 63, 72, 107, 135, 189, 216, 279, 290, 317, 325, 335,365, 378: n = A,T,C or G
tttttttttttttttttttttttttttttttttngggagagcagggtcactttattggtntanaaactgcanagggaccaggggctttagctgttggcagctatggngtccttaatccagtccacatagttgtanaccttggtgtaaactccaggcctgttcttctgggcccagccatagccccagganacaattccttggagctctccattgganaccacagggccaccaaaatcaccctggcaggaatccttgcctccctcgaggaagcccacacanaacatgttgtnggtaatctttccagggtaggaggcttnacactcancctggctcancacaggagcatccaggcactgcagctcgtntgggtagtcggcnccaaaactcaaagtgttgc

SEQ ID NO: 3118 - DNA, 431 bp, Homo sapiens
  misc_feature 111, 284: n = A,T,C or G
caagcttttttttttttttttttttttttgttagttaaaaaatttaattgtaaggatcaagcagtggttattggtgaaaccaatacacactgacagctttgaagtgttcanatgctaattttaaaataaatgtggcaaataccaatcagatgttcataacacttttcaggatccacatcaacttgattatggacatagttcaatacacaagggtaagagaaagagtgtgtaatcaccaataattaaaccagaggcataatttttcaaataatttttagttacanaataaattctaactttttaaagtctaaagctacataaaactcaaagcaatctatttttctacctgaggtcaaaatgactttcctttttcctaactaaacataattcttagcattgaggtaaatctgaattcatgtggtatgctttgt

SEQ ID NO: 3119 - DNA, 507 bp, Homo sapiens
  misc_feature 394: n = A,T,C or G
actatctggtttgagagtgcccttgaaaatttcatactgcttagagtttcctttatttccgaacaaagaaactagtatgtgtcctgtaaccttttttccagacagtgtgacagataccttatacctccaacgtgcaaaattactggcatcaccagtgtctagataaaatttctggcccacatcatttgttttcccaggatatctatcagcatagtgacccatctgtgggcagcctccacttggacaagggaaacacttgtttgcagtgaagacgttgtaagaggcacaggggaatccagcaaagccatcagggttgacgatgctatcagtgtaatatttgcagcttcttaagtgattacaggccgcaaagtctcgagtcccttcccagattccngtctatgtccacaatctgagagagaatgttctttttacatccaggcatttccactcctccatttggaaagaaatctaggtggcccacgacttggctcattccaaaccccaaat

SEQ ID NO: 3120 - DNA, 466 bp, Homo sapiens
  misc_feature 407: n = A,T,C or G
acaatttaatttttctgcttgcccaagaaacaaagcttctgtggaaccatggaagaagatgaaaatgagactggcaaagaacaaatgctgaatctgaagaagaggacaactttgggcaaataatctgcatacttttaattgggaataggatggaaaatatgaatgctaaatcaaattttttaaaaaatacaccacacgatacaactcaatacaggagtatttcttctcaaattcttctagcaccatcaacattcttcaagtatctgaaatactattaattagcacctttgtattatgaacaaaacaaaacaaggacctcagttcatctctgtctaggtcagcacctaacaatgtggatcacactcatgggaaagtgttttgaggtagtttaaacctttggaagtttngggttttaaacttccctctgtggaagatattcaaaagccacaagtggtgcaaatgttta

SEQ ID NO: 3121 - DNA, 80 bp, Homo sapiens
acagttgacttccgtgttaaagcagaagatactgtcactgtggagaatgttctaaagcagaatgaactacaatacaaggt

SEQ ID NO: 3122 - DNA, 436 bp, Homo sapiens
attttgttgaatttcttcagtcggcgttcggttactcaccttccaacgtgcatgtcattggccacagcctgggtgcccacgctgctggggaggctggaaggagaaccaatgggaccattggacgcatcacagggttggacccagcagaaccttgctttcagggcacacctgaattagtccgattggaccccagcgatgccaaatttgtggatgtaattcacacggatggtgcccccatagtccccaatttggggtttggaatgagccaagtcgtgggccacctagatttctttccaaatggaggagtggaaatgcctggatgtaaaaagaacattctctctcagattgtggacatagacggaatctgggaagggactcgagactttgcggcctgtaatcacttaagaagctacaaatattacactgatagcatcgt

SEQ ID NO: 3123 - DNA, 331 bp, Homo sapiens; identical to SEQ ID NO: 3099

SEQ ID NO: 3124 - DNA, 331 bp, Homo sapiens
acctctggacgtgagatccaagtgacagagcttctcaacaagttagacttttatgtcctgcctgtgctcaatattgatggctacatctacacctggaccaagagccgattttggagaaagactcgctccacccatactggatctagctgcattggcacagaccccaacagaaattttgatgctggttggtgtgaaattggagcctctcgaaacccctgtgatgaaacttactgtggacctgccgcagagtctgaaaaggagaccaaggccctggctgatttcatccgcaacaaactctcttccatcaaggcatatctgacaatccactcgt

SEQ ID NO: 3125 - DNA, 381 bp, Homo sapiens
gggactcgagactttgcggcctgtaatcacttaagaagctacaaatattacactgatagcatcgtcaaccctgatggctttgctggattcccctgtgcctcttacaacgtcttcactgcaaacaagtgtttcccttgtccaagtggaggctgcccacagatgggtcactatgctgatagatatcctgggaaaacaaatgatgtgggccagaaattttatctagacactggtgacgccagtaattttgcacgttggaggtataaggtatctgtcacactgtctggaaaaaaggttacaggacacatactagtttctttgttcggaaataaaggaaactctaagcagtatgaaattttcaagggcactctcaaaccagatagt

SEQ ID NO: 3126 - DNA, 559 bp, Homo sapiens
actcttgtccacagcagagacattgagtataccattggcatcaatgtcaaaagtgacttcaatctgaggaacacctcggggtgcaggaggtatgcctgtgagttcaaacttgccaagcaggttgttatcctttgtcatggcacgctcgccttcataaacctgaataagcacaccaggctggttgtcagaataggtagtgaaggtctgtgtctgcttggtaggaatggtggtattacgcttgatgaggacagtcatgactccaccagcagtttcaataccaagggaaagaggagtgacatccaagagcagcaaatcttgaacattctcagacttgtctccagacaagatggctgcctggacagctgcaccataagcaacagcttcatcagggttgatgctcttattcagttcttttccattgaagaagtcttggagaagcttctgaatcttggggatacgagtagaaccaccaaccaggacaatatcatgaatctgtgacttgtctagtttggcatctcgaagggctttctctactgggtccagggtgccacggaacagg

SEQ ID NO: 3127 - DNA, 191 bp, Homo sapiens
actgtgaggtttgatttgtgtgacagaatctggcttccagaagtcaatctgggtcgtgctggccaactcgcggattatgttaatgtgattttcatcttcaacgttaacacggaacaccttctcgccttcaaagtgctcaccaccatgatgagcagatgccagggccacagtcaccagaaccaagagtgcca

SEQ ID NO: 3128 - DNA, 619 bp, Homo sapiens
acacttttgttacagttacatatatgaatagttagcagaggagaaactcctccgttgttcctacaccaagggaaaaaatgtaaggactgtatagctcatgaataatattaacatttttctatcacaaaatattgataaaattggaattgtatcaattcatgttatggagcttaacattttagccgaaatattaagataatataaataaggcttttagcttcatatcaagacctatttgaacacttctagaaaagaacattaaaagttttttcctcatttatggtttgatttagtgtagtgcctcaactgttcttaatggtgtcttagtataatgcataattattagaatataattataaggcattacagaattttatgtggatacttgcaaagatatttcagtccaaaacttcaaattacacacccaaatatgtttgttgccttaatctatacttggacaaaggcaacattttaatttttgctaagtcttaactttagccagatgggttgaaatgtaaaattttcatcctcatcttgcattgaaaaaatacttgtgttcagttatgttcactttgtaaggtcattaaagcctaattgctaaatcaacttctaagtatac

SEQ ID NO: 3129 - DNA, 567 bp, Homo sapiens
actgaagatcagcgatgcaaactcattagggaggagatggtctgaactgagttggagacatagtctagtttaatttttgacttcatagtaattgcaggactagttctagacatccatttttcagcttcccctagtttttgaacttgcaaacaaaggagaacttcttctcacaagattcatccttccatttcttgaatcctgagcatgaagtcaggcttgcgcagtagccagcattagcactgctcggggatccagtgtcccaggacttgtaggagaccagggacccactactccagtgccagcggcggttcttttttgggtcatggaggccaatccagacattgctgtcatcagtgctactctccttaatcagtgaggccacgaaggcaccctccgcctgggtgagcacagacaccaggttgcctgaattcatgttctggcaatagagatctgcatcaacccaggtctcagggtcttcattaaagtagtagcagtaggagcgataggcattggtgccttctgggcagctgattcggggattaggcagctctgtctgggactcctggc

SEQ ID NO: 3130 - DNA, 331 bp, Homo sapiens; identical to SEQ ID NO: 3099

SEQ ID NO: 3131 - DNA, 230 bp, Homo sapiens
acgaacagcctctcttacaaaccactggcagaatgcaggagaaatccactctctggcatggaaaccacagtccatgaacttggcaggcttattttgtccagctttgccaaccttcaggaggtaaatagcgcgtccctcaaatgtggttccgataacactgcgagagatgagggctggattctcagtggcgacttgttgagtccaagcctctatcgtttcccacttgttgt

SEQ ID NO: 3132 - DNA, 385 bp, Homo sapiens
aagaaccattttctcttcagacaaaaggaactgttgtttggggtagcattttatttatacttataaaatgttatgttacagtttgtgttgttacatgaatgtatttgtctcttaaatcatggtatagtgtgaagaaaatgagttctcaggctggaaatatctgtatttgagtacacatatggcccgggagctacaacaatctatcctgctgctgggggctctgacgactgggcttatgaccaaggaatcagatattccttcacctttgaacttcgagatacaggcagatatggctttctccttccagaatcccagatccgggctacctgcgaggagaccttcctggcaatcaagtatgttgccagctacgtcctggaacacctgt

SEQ ID NO: 3133 - DNA, 594 bp, Homo sapiens
  misc_feature 524: n = A,T,C or G
acttcactgcggacttgacttcttgagcaagaaggctggcactgttcattaagagaatcacagagatgaatctcacaatgcaggaaaactaggtcataatgtccagcaaacatgaacatctgaactgagaaccggctttccgaggactgcccattctcctccacgtggatggtggaatcacgttgatttgagcagctgtttctgatgatgaaatacttcacaaggtcagccttgtcttcagtgggggtggcatagcagttcctcaacaccaagttaaaccgggaggtgtccccttgttccaagatggcacccacatacagcacggactcaacagacagttcaactgcatccccttcgtaaggattcgtgtagttctggtcttggaagagggccatcctgacaatgaactctccattcccgtccacactgacgttcagggaacttacaatgggctgcaaggcagcttggaggctgactttcatgtccagtgggtaggcacattggaagttgatgttgaggatggngtctctgatgatgaaatcattgaccaaggagagggtgtttttgtagatggcatgggtttgatttctctcc

SEQ ID NO: 3134 - DNA, 120 bp, Homo sapiens; identical to SEQ ID NO: 3033

SEQ ID NO: 3135 - DNA, 565 bp, Homo sapiens
actatctggtttgagagtgcccttgaaaatttcatactgcttagagtttcctttatttccgaacaaagaaactagtatgtgtcctgtaaccttttttccagacagtgtgacagataccttatacctccaacgtgcaaaattactggcatcaccagtgtctagataaaatttctggcccacatcatttgttttcccaggatatctatcagcatagtgacccatctgtgggcagcctccacttggacaagggaaacacttgtttgcagtgaagacgttgtaagaggcacaggggaatccagcaaagccatcagggttgacgatgctatcagtgtaatatttgtagcttcttaagtgattacaggccgcaaagtctcgagtcccttcccagattccgtctatgtccacaatctgagagagaatgttctttttacatccaggcatttccactcctccatttggaaagaaatctaggtgacccacgacttggctcattccaaaccccaaattggggactatgggggcaccatccgtgtgaattacatccacaaatttggcatcgctgggg

SEQ ID NO: 3136 - DNA, 498 bp, Homo sapiens
gttggacccagcagaaccttgctttcagggcacacctgaattagtccgattggaccccagcgatgccaaatttgtggatgtaattcacacggatggtgcccccatagtccctaatttggggtttggaatgagccaagtcgtgggccacctagatttctttccaaatggaggagtggaaatgcctggatgtaaaaagaacattctctctcagattgtggacatagacggaatctgggaagggactcgagactttgcggcctgtaatcacttaagaagctacaaatattacactgatagcatcgtcaaccctgatggctttgctggattcccctgtgcctcttacaacgtcttcactgcaaacaagtgtttcccttgtccaagtggaggctgcccacagatgggtcactatgctgatagatatcctgggaaaacaaatgatgtgggccagaaattttatctagacactggtgatgccagtaattttgcacgttggaggta

SEQ ID NO: 3137 - DNA, 488 bp, Homo sapiens
actcctgtgccacaggggttccagaaaagggaagtcactttaccttgcggtggtgggatcctgatgtctttcatccatttgtagtaaaagctggtaaagcttttcttactcctggttccctaccagtatttctaaacatgtcgcactttctccacaggcatgtggttttgacctttttttcaatcttctagaaagggaacggaagcagaagtgggacatcgagggctctgctgtcctctgcgctgggtgtggaatgctgctgcacctgtcccttctgctggctcagggaagtgtcttcttgcccacatttctgtggggaaaggtttttaatcctctgatgcttccatcttcctgtttaggccatgtgcccagaaacctggactgatctttctttaatagtgaacccctgggccactgaagagtaacatggctccactggacacaaaagagggatggaatcaacaggcagggggccttttataagcctt

SEQ ID NO: 3138 - DNA, 495 bp, Homo sapiens
accagggggaccgggagggcctggggggccagctggtccaggatagcctgcgagtcctcctactgctactccagacttgacatcatatgaatcatactggggagaatagttctgaggaccagtagggcatgattcacagattccaggggggccaggagaaccaggggaccctggttgtcctggaataccagggtcaccatttctcccaggaataccaggagggcctggatctcccttggggccttgaggtccttgaccattaggagggcgagtaggagcagttggaggctgtgggcaaactgcacaacattccccaaatggaatttctgggttggggcagtctaattcttgatcgtcacatattatgtcatcgcagagaacggatcctgagtcacagacacatatttggcatggttctggcttccagacatctctatccgcataggactgaccaagatgggaacatcctccttcaacagcttcctgttgtgccaa

SEQ ID NO: 3139 - DNA, 399 bp, Homo sapiens
actatgcagacacaaggaattgtttgataaatgaataaattatatgtatatttgaggccaatttgtgtttgctgctctggtaattttgagtaaaaatgcagtattccaggtatcagaaacgaaaacacatggaaactgcttttaaactttaaaatatactgaaaacataagggactaagcttgttgtggtcacctataatgtgccagataccatgctgggtgctagagctaccaaagggggaaaagtattctcatagaacaaaaaatttcagaaaggtgcatattaaagtgctttgtaaactaaagcatgatacaaatgtcaatgggctacatatttatgaatgaatgaatggatgaatgaatattaagtgcctcttacataccagctattttgggtac

SEQ ID NO: 3140 - DNA, 331 bp, Homo sapiens; identical to SEQ ID NO: 3037

SEQ ID NO: 3141 - DNA, 522 bp, Homo sapiens
tgtagattcatcttttaacgtttcttcaaatttgtttctgtcaggctttgtgttattttaaatggttttttaaaattttcttctatgttttcaattacctaaagacataggataatagttttttttaagttagaattttacctcataaaattttttgaggtttgatgtatgtctctgtcttatcaataatgaggcttaaaaaatactggatttgaatggctgccgttttttcaaagcaatatgaatttgatgagtttgttttatgccattaggtggcgccagaggtcagaacatgtctattttgaattggatcgttacaaatgagcatatttgatgcggaaatttctgggagaaaaaaattgaggaaataaagttaaaaaattgacattcattgagccaaaagagatgtggagaaacatttttcacctttctgtttggcctgattaacatttaaattcttgccaaaattaaggtaacttttaaaaaacaccttttataggtggatccagcagtctggcaacg

SEQ ID NO: 3142 - DNA, 493 bp, Homo sapiens
acctacagacacttttacagagttaatactaaaattacaaattgatgacactttcgaggcaaagcagggtaactgttccttcagtgttgccatcactgaattgactttcactgttccatcatactgtttggctgaacactgacattccatagtctacaactataaagatacctacctatgtgagtttaaaaagtgatctgcacaaaagaaataaaaaaactttatatacaaccaattgttttttaaaaatacaaaaataacatctgtcacttttgtcatgctgacaatttgacatatatacacatgcaggagaaaagttccaattcagtgatctggacaactgtagcttgtatatttttaatatgatggacacactgccgctgaattttcacactgacagagatgtgtattcaaaatatttcatatactaaatactacaatctctgtatgtataaatcctggtgataatagtttttgttctacttgattaaaa

SEQ ID NO: 3143 - DNA, 270 bp, Homo sapiens
actcacccaacaccacctggtaggtcagatccctcgagatgcagtggccggcagtcacaacccaatcgggggcgatgaggctaccgccacacgtgtggtagaagcttccacttttctcatactgcagggaaacctgccagggccagctgtaggggaccgcatcctcaccatggacaacgcggctggaagagtgagaggaaggtgggccatagcctgaggcaacggccacaaggaggagggaactgagcagccggagcatcatgagttttg

SEQ ID NO: 3144 - DNA, 331 bp, Homo sapiens
acctatggacgtgagatccaagtgacagagcttctcaacaagttagacttttatgtcctgcctgtgctcaatattgatggctacatctacacctggaccaagagccgattttggagaaagactcgctccacccatactggatctagctgcattggcacagaccccaacagaaattttgatactggttggtgtgaaattggagcctctcgaaacccctgtgatgaaacttactgtggacctgccgcagagtctgaaaaggagaccaaggccctggctgatttcatccgcaacaaactctcttccatcaaggcatatctgacaatccactcgt

SEQ ID NO: 3145 - DNA, 319 bp, Homo sapiens
cgtcaaccctgatggctttgctggattcccctgtgcctcttacaacgtcttcactgcaaacaagtgtttcccttgtccaagtggaggctgcccacagatgggtcactatgctgatagatatcctgggaaaacaaatgatgtgggccagaaattttatctagacactggtgatgccagtaattttgcacgttggaggtataaggtatctgtcacactgtctggaaaaaaggttacaggacacatactagtttctttgttcggaaataaaggaaactctaagcagtatgaaattttcaagggcactctcaaaccagatagt

SEQ ID NO: 3146 - DNA, 505 bp, Homo sapiens
ggtccccggaagttggacgcatgcgccgtttctctgcatggtgtgcgttctcgttctagctgcggccgcaggagctgtggcggttttcctaatcctgcgaatatgggtagtgcttcgttccatggacgttacgccccgggagtctctcagtatcttggtagtggctgggtccggtgggcataccactgagatcctgaggctgcttgggagcttgtccaatgcctactcacctagacattatgtcattgctgacactgatgaaatgagtgccaataaaataaattcttttgaactagatcgagctgatagagaccctagtaacatgtataccaaatactacattcaccgaattccaagaagccgggaggttcagcagtcctggccctccaccgttttcaccaccttgcactccatgtggctctcctttcccctaattcacagggtgaagccagatttggtgttgtgtaacggaccaggaacatgtgttcctatctgtgtatctgcc

SEQ ID NO: 3147 - DNA, 237 bp, Homo sapiens
actgctaccattacatggttccttattaaatttgaaaagtgcctgaaagtttgggcaccagaaagacaccccaacaacatgtgtctaaactgcaacttcaggttaatatgactaaagcagttacattgtgagaagtgctgaaggtatgtgatgtctttcccggcacagaggtggccttggttcctcaccagatggtgtagccaccatctgaaccacccatgaagaagttccccttcc

SEQ ID NO: 3148 - DNA, 213 bp, Homo sapiens
acacatatggcccgggagctacaacaatctatcctgctgctgggggctctgacgactgggcttatgaccaaggaatcagatattccttcacctttgaacttcgagatacaggcagatatggctttctccttccagaatcccagatccgggctacctgcgaggagaccttcctggcaatcaagtatgttgccagctacgtcctggaacacctgt

SEQ ID NO: 3149 - DNA, 542 bp, Homo sapiens
accacagtatcttcctccttctgcggtctctctgtttttgtcttgcttatgcttcttcaactctgcgcctggataactttcatgttaatccattctgagtcatttgttcttcttggcctgtcaagacacccaaaaaaggccaagctgttcacccagggagccatactggcacattccttctgcgcttgatactatctgttaattcccttcagccagggaccagtcactttaggctattagcctgcaggtcatttagaagatttaagtaaatatctgatttgaggaacctgggataagagtccttttccataagagtatatatgactttttgtgcttcatcaaaacacgtgggggttggtgctttaatcttcttggctgtagattctcgagtgcggaagtcaatattgatttgtttagcagcatctgaatgcacaaatgctttatatatctcttctgctttacagggcaaaagatcagactctgttttcttatagtcttcacaagccagccagaactcaatattctcctcactgaattcagac

SEQ ID NO: 3150 - DNA, 230 bp, Homo sapiens
acgaacagcctctcttaccaaccactggcagaatgcaggagaaatccactctctggcatggaaaccacagtccatgaaaatggtaggcttattttgtccagctttgccaaccttcaggaggtaaatagcgcgtccctcaaatgtggttccgataacactgcgagagatgagggctggattctcagtggcgacttgttgagtccaagcctctatcgtttcccacttgttgt

SEQ ID NO: 3151 - DNA, 474 bp, Homo sapiens
  misc_feature 343, 474: n = A,T,C or G
acacaatggtttattaaaggaatgtatggcccacatcaacctagcaaggattctactggtaaaccttcccatggccaaaggaaaaacaagcaggagttgagtggctggggtggggtgcaggcaatggagagagggcagaagggtgtagaagctgaagggggctagaagcttactcctgagtttcttccttctgtcttcaaatctttacttcttatggccaaagacccagctgtttcataggctggagatgcactcttctagactgctcgagacagccagagacaggggaggagggaagaaggatactgtggaaagggatggcggggcaaacatttagagctanaagccactactgggccaatgctaaagtttctgtctctaagcctaaaaaagccagtgtagtagggcccttatcactcttagtttgctaggtttcccctctgaaataatgagcagatttagccaggctagcan

SEQ ID NO: 3152 - DNA, 379 bp, Homo sapiens
acttgatgccctggctgtaggtccagtcaatagtgcttccactggcttgataaattgccttgatgatgctgccatagttgaacttggtcccgtagagagaggccagggctgtcacagcagccttggaaagctgatccagctcatcctggtcagggactggttctgttttgtagccatagggatacatgaggagctgggagtagctgtggatggagatgaaggccttgatgttcccatggtccttcacaaagtctacaatggacttgacctccacttcggaattggcaaacttgccgtggtaagtctccgagcaggggttactgctggctccggacaacccaaagccagcgtcccagttcctgttggggtccacgccaat

SEQ ID NO: 3153 - DNA, 230 bp, Homo sapiens; identical to SEQ ID NO: 3096

SEQ ID NO: 3154 - DNA, 521 bp, Homo sapiens
  misc_feature 461, 463, 515: n = A,T,C or G
gtaagaatctgttcaaggtggaaagtgtgaactgtatctgtgtggactggaaaggtggctcccgaactggatacacacaagcctcgcagaacatcaggatcgtgggagcagaagtggcatattttgttgaatttcttcagtcggcgttcggttactcaccttccaacgtgcatgtcattggccacagcctgggtgcccacgctgctggggaggctggaaggagaaccaatgggaccattggacgcatcacagggttggacccagcagaaccttgctttcagggcacacctgaattagtccgattggaccccagcgatgccaaatttgtggatgtaattcacacggatggtgcccccatagtccccaatttggggtttggaatgagccaagtcgtgggccacctagatttctttccaatggaggagtggaaatgcctggatgtaaaaagaacattctctttnanattgtggacatagacggaatctgggaagggactcgagactttgcggcctgtnatcact

SEQ ID NO: 3155 - DNA, 262 bp, Homo sapiens
actcattccaatgaatttgactcagatgtggatgttggggacttgcagatggttaaatttatttggtataacaatgtgatcaacccaactttacctagagtgggagcatccaagattatagtggagacaaatgttggaaaacagttcaacttctgtagtccagaaaccgtcagggaggaagttctgctcaccctcacaccgtgttaggagactactgttatttgaccaatgaattgacttctaataaaatctagtggtgatg

SEQ ID NO: 3156 - DNA, 305 bp, Homo sapiens
cacggaggaggacttctacaagctggtcagtgagttcacaatcaccaaggggctcagaggcgccaagacgacctttgatgtctacaccgagtcctgggcccaggacccatcccaggagaataagaagaagactgtggtggactttgagaccgatgtcctcttcctggtgcccaccgagattgccctagcccagcacagagccaatgccaagagtgccaagacctacgcctacctgttttcccatccctctcggatgcccgtctaccccaaatgggtgggggccgaccatgcagatgacattcagt

SEQ ID NO: 3157 - DNA, 331 bp, Homo sapiens
gcgagtggattgtcagatatgccttgatggaagagagtttgttgcggatgaaatcagccagggccttggtctccttttcagactctgcggcaggtccacagtaagtttcatcacaggggtttcgagaggctccaatttcacaccaaccagcatcaaaatttctgttggggtctgtgccaatgcagctagatccagtatgggtggagcgagtctttctccaaaatcggctcttggtccaggtgtagatgtagccatcaatattgagcacaggcaggacataaaagtctaacttgttgagaagctctgccacttggatctcacgtccataggt

SEQ ID NO: 3158 - DNA, 401 bp, Homo sapiens
gggccatctggatttctttccaaatggaggaaaggaaatgcccggatgtaagaaaaatgtcctttcaaccattactgatattgatggaatatgggaaggaattggtggctttgtgtcttgcaatcacctaagaagcttcgagtattactcaagcagcgtcctcaaccctgatggcttcctgggctatccctgtgcctcctacgatgagtttcaggagagtaagtgtttcccttgtccagctgaaggatgccccaaaatggggcactatgctgaccaatttaaggggaaaacaagtgctgtggaacaaacctttttcctgaacacaggagagagtggtaactttactagttggagatataaggtatcagtcacactttctggaaaagagaaagtgaatgggt

SEQ ID NO: 3159 - DNA, 213 bp, Homo sapiens; identical to SEQ ID NO: 3148

SEQ ID NO: 3160 - DNA, 548 bp, Homo sapiens
ggcatattttgttgaatttcttcagtcggcgttcggttactcaccttccaacgtgcatgtcattggccacagcctgggtgcccacgctgctggggaggctggaaggagaaccaatgggaccattggacgcatcacagggttggacccagcagaaccttgctttcagggcacacctgaattagtccgattggaccccagcgatgccaaatttgtggatgtaattcacacggatggtgcccccatagtccccaatttggggtttggaatgagccaagtcgtgggccacctagatttctttccaaatggaggagtggaaatgcctggatgtaaaaagaacattctctctcagattgtggacatagacggaatctgggaagggactcgagactttgcggcctgtaatcacttaagaagctacaaatattacactgatagcatcgtcaaccctgatggctttgctggattcccctgtgcctcttacaacgtcttcactgcaaacaagtgtttcccttgtccaagtggaggctgcccacagatgggtcactatg

SEQ ID NO: 3161 - DNA, 270 bp, Homo sapiens; identical to SEQ ID NO: 3143

SEQ ID NO: 3162 - DNA, 213 bp, Homo sapiens; identical to SEQ ID NO: 3148

SEQ ID NO: 3163 - DNA, 503 bp, Homo sapiens
  misc_feature 421: n = A,T,C or G
acctttgagaacttcctaggaaggaatggtggggtggcgtttgggaacttgtgccccctaaacacatttactggcctcctctaatgactttggggaaaagatgattctgggtctttcccttgacttcttgtttcaattacaaactcctgggctttctggggaggggttcagaaaacatcaaaacactgcagcagttcctaaatgattctcacaagcaaccctgagagagacagtcttgtgagggagatctgggggaggcaggaagctcctcagattttctcacagacccttcccaattccatcaccactgccaacaactcctcccccggagatctggctggagcccagaaaaagaagcatgtggtttaaaaaatgtttaaatcaatctgtaaaaggtaaaaatgaaaaacaaaaacaagcnaacaaacaaaaaacaatggaaaagatgaagctggagagagaggaaccagttgccaaggtagagagctgcccgctcctgccct

SEQ ID NO: 3164 - DNA, 230 bp, Homo sapiens
acgaacagcctctcttacaaaccactggcagaatgcaggagaaatccactctctggcatggaaaccacagtccatgaaaatggcaggcttattttgtccagctttgccaaccttcaggaggtaaatagcgcgtccctcaaatgtggttccgataacactgcgagagatgagggctggattctcagtggcgacttgttgagtccaagcctctatcgtttcccacttgctgt

SEQ ID NO: 3165 - DNA, 372 bp, Homo sapiens
acttgaccccacagccatctgggatgagccgcttttcagccaccatgtcttcaaattcatcagcattgaacttggtgaagccccacttctttgagatgtggatcttctggcggccaggaaacttgaacttggccctgcgcagggcctcaatcacatgctccttgttctgcagcttggtgcggatggacatgataacttggccaatgtgaaccctggccacagtgccctggggctttccaaaggcacctcgcatgcctgtttggagcctgtcagccccagcacaggacaacatcttgttgatgcggatgacgtggaaggggtggagccgcacccggatatggaagccatctttgccacaactttttaccatgt

SEQ ID NO: 3166 - DNA, 411 bp, Homo sapiens
gcgccaacgccgccgacatcgactatatagcaggcaccaacaacatggacggccacatcttcgccagcatcgacatgcctgccatcaacaagggcaacaagaaagtcacggaggaggacttctacaagctggtcagtgagttcacaatcaccaaggggctcagaggcgccaagacgacctttgatgtctacaccgagtcctgggcccaggacccatcccaggagaataagaagaagactgtggtggactttgagaccgatgtcctcttcctggtgcccaccgagattgccctagcccagcacagagccaatgccaagagtgccaagacctacgcctacctgttttcccatccctctcggatgcccgtctaccccaaatgggtgggggccgaccatgcagatgacattcagt

SEQ ID NO: 3167 - DNA, 261 bp, Homo sapiens
gtttgaagtccttgagagaggattatgatgcgactgtgagtgcgttcgtagtttgagtttgctaggcagaatagtaatgaggatgtaagtccgtgggcgattatgagaatgactgcgccggtgaagcttcagggggtttggatgagaatggctgttactacgagggctatgtggctgattgaagagtatgcaatgagcgattttaggtctgtttgtcgtaggcagatggagcttgttataattatgcctcatagggatagt

SEQ ID NO: 3168 - DNA, 230 bp, Homo sapiens
acaacaagtgggaaacgatagaggcttggactcaacaagtcgccgctgagaatccagccctcatctctcgcagtgttatcggaaccacatttgagggacgcgctatttacctcctgaaggttggcaaagctggacaaaataagcctgccattttcatggactgtggtttccatgccagagagtggatttctcctgcattctgccagtggtttgtaagagaggctgttcgt

SEQ ID NO: 3169 - DNA, 276 bp, Homo sapiens
acatcattatttccatgctaatgtgtgtctgtgatccagaataacttctcccactcatatcttcagttcacctaatgaaatgaatggatagcaagagccctttgttcccaggactttaaggcaaaatattaaaaattattgccaaaattaagaatataatgtttgtataaatgtccttgaatttgccatttaaattaactcattttcttttcactttgatttgaaagctgataagtatttctgcagcagatagaatattaaaatcaggttgtgtgt

SEQ ID NO: 3170 - DNA, 524 bp, Homo sapiens
atttacgtgctgaagttcagcacggggggcagtaagcgtccagccatctggatcgacacgggcatccattcccgggagtgggtcacccaggccagtggggtctggtttgcaaagaagatcactcaagactgcgggcaggatgcagctttcaccgccattctcgacaccttggacatcttcctggagatcgtcaccaaccctgatggctttgccttcacgtacagcacgaatcgcatgtggcgcaagactcggtcccacacagcaggctccctctgtattggcgtggaccccaacaggaactgggacgctggctttgggttgtccggagccagcagtaacccctgctcggagacttaccacggcaagtttgccaattccgaagtggaggtcaagtccattgtagactttgtgaaggaccatgggaacatcaaggccttcatctccatccacagctactcccagctcctcatgtatccctatggctacaaaacagaaccagtccctgaccaggatgagctggatca

SEQ ID NO: 3171 - DNA, 331 bp, Homo sapiens; identical to SEQ ID NO: 3099

SEQ ID NO: 3172 - DNA, 540 bp, Homo sapiens
actatctggtttgagagtgcccttgaaaatttcatactgcttagagtttcctttatttccgaacaaagaaactagtatgtgtcctgtaaccttttttccagacagtgtgacagataccttatacctccaacgtgcaaaattactggcatcaccagtgtctagataaaatttctggcccacatcatttgttttcccaggatatctatcagcatagtgacccatctgtgggcagcctccacttggacaagggaaacacttgcttgcagtgaagacgttgtaagagacacaggggaatccagcaaagccatcagggttgacgatgctatcagtgtaatatttgtagcttcttaagtgattacaggccgcaaagtctcgagtcccttcccagattccgtctatgtccacaatctgagagagaatgttctttttacatccaggcatttccactccttcatttggaaagaaatctaggtggcccacgacttggctcattccaaaccccaaattggggactatgagggcaccatccgtgtgaattac

SEQ ID NO: 3173 - DNA, 331 bp, Homo sapiens; identical to SEQ ID NO: 3009

SEQ ID NO: 3174 - DNA, 281 bp, Homo sapiens
acatactaaaaatatttaaaatagagaatattcctcacagaggacttttttctttaattactgctaaaaaaataattacaaagtccaaacaggcagagagatttagcacactgatcacacgattctccatcatcctccacgcttgctctgaagagggtttaaaaagtccagtttctcgttgatttcgctgctccatttagccaaggttggcctggccactgattggccacaagtgggtaatgcgcttggataggtcatgtttgtgtcttggaaatttgggt

SEQ ID NO: 3175 - DNA, 230 bp, Homo sapiens
acgaacagcctctcttacaaaccactggcagaatgcaggagaaatccactctctggcatggaaaccacagtccatgaaaatggcaggcttattttgtccagctttgccaaccttcaggaggtaaatagtgcgtccctcaaatgtggttccgataacactgcgagagatgagggctggattctcagtggcgacttgttgagtccaagcctctatcgtttcccacttgttgt

SEQ ID NO: 3176 - DNA, 560 bp, Homo sapiens
accaattgtcaactaaggtaagaacattgggtgtgttcccacccacaaactccttcatcacctttgctacattggtgccgctttggtccaagttgcgggcttgggctcgtgcccgcaatttgtttactagttctaccacactgcaggtaatcccagccacagcagctgctgctcccagacccatgccagtgtccaagagcacaaaactgattccttctgtgaagggtgccagacccaggccgaggagggtcaggatgccagaggtagtgccaacagagttggacaccacattggcaatggtggtgcctctgtggacctgctcaacctcctctgcaagggcacggagcttccttatgtgatcctcaagctcccttttcaaccgaggaaactctttcaaaaaccactgcctgtgctgctggtctttatcgtggcggtttttgtccttcatgaccatgtgacttgcaagcttgttcagagctttacggagctcatctgcctcatccctgggcagttcagcagcagccacgaatccattccaggcttcatcatcagtcagcagt

SEQ ID NO: 3177 - DNA, 331 bp, Homo sapiens; identical to SEQ ID NO: 3009

SEQ ID NO: 3178 - DNA, 537 bp, Homo sapiens
cggaactgccacgatgctgccactttggactctttcactgctgctgggagcagtagcaggaaaagaagtttgctacgaaagactcggctgcttcagtgatgactccccatggtcaggaattacggaaagacccctccatatattgccttggtctccaaaagatgtcaacacccgcttcctcctatatactaatgagaacccaaacaactttcaagaagttgccgcagattcatcaagcatcagtggctccaatttcaaaacaaatagaaaaactcgctttattattcatggattcatagacaagggagaagaaaactggctggccaatgtgtgcaagaatctgttcaaggtggaaagtgtgaactgtatctgtgtggactggaaaggtggctcccgaactggatacacacaagcctcgtagaacatcaggatcgtgggagcagaagtggcatattttgttgaatttcttcagtcggcgttcggttactcaccttccaacgtgcatgtcattggccacagcctgggtgcccacgctgc

SEQ ID NO: 3179 - DNA, 576 bp, Homo sapiens
actcttgtccacagcagagacattgagtataccattggcatcaatgtcaaaagtgacttcaatctgaggaacacctcggggtgcaggaggtatgcctgtgagttcaaacttgccaagcaggttgttatcctttgtcatggcacgctcgccttcataaacctgaataagcacaccaggctggttgtcagaataggtagtgaaggtctgtgtctgcttggtaggaatggtggtattacgcttgatgaggacagtcatgactccaccagcagtttcaataccaagggaaagaggagtgacatccaagagcagcaaatcttgaacattctcagacttgtctccagacaagatggctgcctggacagctgcaccataagcaacagcttcatcagggttgatgctcttattcagttcttttccattgaagaagtcttggagaagcttctgaatcttggggatacgagtagaaccaccaaccaggacaatatcatgaatctgtgacttgtctagtttggcatctcgaagggctttctctactgggtccagggtgccacggaacaggtcagcattcagttcttc

SEQ ID NO: 3180 - DNA, 582 bp, Homo sapiens
acacacacacaaaggcaggtattaggttactgagttgggtttctcaccaaatagcaaaagccagggaagcccagaggtgtttaataaacacttgttgactgattgatggaatatactacctagtataattcagacaatacattctttgtcaaaacactaaggtaaattattgagtccacttttattaccaagcgtttctgctgtattgaggagggcaggccagcccaaaactcgtccatcagcctcagagctcaggtttacaaaagaaacccttaggccttacctttcacacctgtttttactctcagcagaggaggccgggactggtctccataaacaactgtgtagttggagccgtgcagtcggaggcccaggcctgatgcagacccagccacgcagcacctttggctctttactacgaatattatcacggctgcaacaaatagtttgtgcacattttttaagagaaaaaaaaaactgagaagagtataaaactggagaaaaaaaaatagtatgttaactaatttacaaagcccggttaagtcttcctgcctcattcttctgagagaaaccaaagcatta

SEQ ID NO: 3181 - DNA, 230 bp, Homo sapiens
acaacaagtgggaaacgatagaggcttggactcaacaagtcgccactgagaatccagccctcatctctcgcagtgttatcggaaccacatttgagggacgcgctatttacctcctgaaggttggcaaagctggacaaaataagcctgccattttcatggactgtggtttccatgccagagagtggatttctcctgcattctgccagtggtttgtaagagaggctgttcgt

SEQ ID NO: 3182 - DNA, 213 bp, Homo sapiens; identical to SEQ ID NO: 3148

SEQ ID NO: 3183 - DNA, 441 bp, Homo sapiens
  misc_feature 236: n = A,T,C or G
actatctggtttgagagtgcccttgaaaatttcatactgcttagagtttcctttatttccgaacaaagaaactagtatgtgtcctgtaaccttttttccagacagtgtgacagataccttatacctccaacgtgcaaaattactggcatcaccagtgtctagataaaatttctggcccacatcatttgttttcccaggatatctatcagcatagtgacccatctgtgggcagcctncacttggacaagggaaacacttgtttgcagtgaagacgttgtaagaggcacaggggaatccagcaaagccatcagggttgacgatgctatcagtgtaatatttgtagcttcttaagtgattacaggccgcaaagtctcgagtcccttcccagattccgtctatgtccacaatctgagagagaatgttctttttacatccaggcat

SEQ ID NO: 3184 - DNA, 335 bp, Homo sapiens
  misc_feature 319: n = A,T,C or G
acgagtggattgtcagatatgccttgatggaagagagtttgttgcggatgaaatcagccagggccttggtctccttttcagactctgcggcaggtccacagtaagtttcatcacaggggtttcgagaggctccaatttcacaccaaccagcatcaaaatttctgttggggtctgtgccaatgcagctagatccagtatgggtggagcgagtctttctccaaaatcggctcttggtccaggtgtagatgtagccatcaatattgagcacaggcaggacataaaagtctaacttgtcgagaagctctgtcacttggatctnacgtccataggtacct

SEQ ID NO: 3185 - DNA, 230 bp, Homo sapiens; identical to SEQ ID NO: 3181

SEQ ID NO: 3186 - DNA, 156 bp, Homo sapiens
  misc_feature 96, 127, 147, 150: n = A,T,C or G
actatctggtttgagagtgcccttgaaaatttcatactgcttagagtttcctttatttccgaacaaagaaactagtatgtgtcctgtaaccttttntccagacagtgtgacagatacctaatacctncaacgtgcaaaattactggnatnaccaga

SEQ ID NO: 3187 - DNA, 522 bp, Homo sapiens
  misc_feature 453: n = A,T,C or G
actggttctttgctgccctgtaatcaatatggcatctcacccccgacaaccaagccagccacagagagaagtggggttcccagggaaaggggtcggctgaccaccctgacggagctggtgagcacaggtgagctctacctcatttgtctctcattcctcaaagtcttctgtggtttggcttcagtgagggcaaaagaggggagactggagtgaaagtgaactctgcttttaaaatgttctttttatctaaggtgtgcagggtgtgtggatagcaagtttgagtggtaagaaaaatcccagtccagggtctgagctctacctcttaaaactcttcagcttaacaaagtgacccacaggaacagacatgaacatctctacacagggcagggccaaaggtgttcccaggatcctgctagccaagggacaagtcctgattgagggtctagagctcancagatttatggaggcagcatgcaccctgggagcctgcccagactcctctctggggtttccgttttatct

SEQ ID NO: 3188 - DNA, 210 bp, Homo sapiens
acactcaaactttatttggttgcctggatggggccagagaggaggacaagaagggtgtcaaagggtcagctcagtaggggtgattcagggtgtgctccatgatggtcagaagcgccagccacgtctccttggctgtggggatgatctgggaggctggcagcaggaagccatagcgcccagtgtcccggagctcgaaggtgaaggagtact

SEQ ID NO: 3189 - DNA, 582 bp, Homo sapiens
  misc_feature 561, 563: n = A,T,C or G
acttaccaacagatactaagtgctggacactcttttaggagctgggaatacagtaataaatgaagcagacaaaatccttatcttcttagagtttacattctagcgatgagtagaacccctttccttgggtctgtgttcagttgtgtattattttaataggctacagactacaaaggacagcacctgaacacttcaataactgtccccatcttgtccttcaacacctttaggaatcaagttcttctctatgtaaaatcagcccagttttataattatctcagtctaacctacctgtaatataccaactcacttcatatttcctaatggagatacatcccatgcttttaagctttatccctataagaaaaaaatatcgatcatttttacaagaaagtgtccacaacctattacaccatttagaattttcttgagtgtaggtggcctctgattgcaatacatatcagcctgtagacagggtctcttggcttcgtatctcacatagctttaggatcgtgttcctaccctattttgatctctcttggtgtatcacttacccaaggngnttgtgttgtttatccgtac

SEQ ID NO: 3190 - DNA, 212 bp, Homo sapiens
acactcaaactttatttggttgcctggatggggccagagaggaggacaagaagggtgtcaaagagtcagctcagtaggggtgattcagggtgtgctccatgatggtcagaagcgccagccacgtctccttggctgtggggatgatctgggaggttggcagcaggaagccatagcgcccagtgtcccggagctcgaaggtgaaggagtacctg

SEQ ID NO: 3191 - DNA, 447 bp, Homo sapiens
acagtgtaagccaaagtcaaatgtggggtatatgaagaaattcagagcatcagccagttctccagaaccagccccttgccactgtaaagtgaaaggctcctgtgaggagggcgctgggattgtgtaaggtcaattctcaacgtcttcctgaaggcagtgcccagggagaaagccgaatccagaggtccagatccatagagtggaggttctgaggagttggaaggagctggaaagaataattccaagagctttaatggcctctttcccacagccacccagccccacccaagcccttcaacttgaaatctgcctgaagggggcgggggcattgtggagagaagatgcaggaggcaatagtatggaatgggactcctggggaagcagaggttcccttgggcctttgtccttggctgggatcccctagcctgagcagttagaatggaatgt

SEQ ID NO: 3192 - DNA, 331 bp, Homo sapiens; identical to SEQ ID NO: 2994

SEQ ID NO: 3193 - DNA, 269 bp, Homo sapiens
accacaagaatgttctgcatgccagattacttttctacaggtggtgtataatagcaactgacttgtgaatattaagccacctttgcattcctggaacacaatctatttgattaccattttaccttttcccagaacaagtccatctttgttttgtttacccagtatcaggtcatatgaccactataaaacaagttactggcaaagagaatgaaatcattattattttgactaatcaggattcccctgtgtcatgtgaagaagtggtaggt

SEQ ID NO: 3194 - DNA, 213 bp, Homo sapiens; identical to SEQ ID NO: 3148

SEQ ID NO: 3195 - DNA, 510 bp, Homo sapiens
  misc_feature 499: n = A,T,C or G
actatgctaggcactggggacacaaagcaacatgaaacatggtccctatgctggaaagagttacagacttgtgaaagagaccaacaggtaaatacatcctaagaactggataagtgacaaaaatgaagcatagggactcataagaaagtttgttgagactcataagaaagagtgattaactcagggaaagtcatttcctctacagagcatatcattcatcccttcaacaggcattttttggattctgaagtataaggaggtgtttataagtagaaaaggcaaaagaacatcatatgcaaatccctgaagttctgaaagggatttcatgttcggggacatggttgaactacatacaaaatgctatggaagcacaaggcatcatcaagcacagtgattgcttctgcctggggtgtcaaggagggcgtcagagaggggatggcatgcgatctacctcctcaacatatccataaactctgtttgtaaactgataattctgaanccattttaggt

SEQ ID NO: 3196 - DNA, 199 bp, Homo sapiens
cacaatgttggcactcttggttctggtgactgtggccctggcatctgctcatcatggtggtgagcactttgaaggcgagaaggtgttccgtgttaacgttgaagatgaaaatcacattaacataatccgcgagttggccagcacgacccagattgacttctggaagccagattctgtcacacaaatcaaacctcacagt

SEQ ID NO: 3197 - DNA, 159 bp, Homo sapiens
acccatctcacaaccaaggcaaagccacaagttgcttctgacactattggaagctgggccccagggccacaggaatgggggcaggtcccttgggcggggtgaaccaggaagggaggaggctccttggcttcggcgcttaggagtccttatgggccattg

SEQ ID NO: 3198 - DNA, 331 bp, Homo sapiens; identical to SEQ ID NO: 2994

SEQ ID NO: 3199 - DNA, 506 bp, Homo sapiens
  misc_feature 340: n = A,T,C or G
actttgaactacctgactcattccagcactagagaagtgtgttttactcatttgaggaacagcacatcagctttgcccttgacatggacaataggttttttactttgacggtgacaagtctccacctggtcttccagatgggagtcatattcccacaataagcagcccttactaagccgagaggtgtcattcctgcagacaggacctataggcacctgaagatttgaatgaaactatagttccatttggaagcccagacataggatgggtcagtgggcatggctctattcctattctcagagcatgccagtggcaacctgtgctcagtctgaagacaatngacccacgttaggtgtgacacgttcacataactgtgcagcacatgccgggagtgatcagtcggacattttaatttgaaccacgtatctctgggtagctacaaaattcctcagggatttcattttgcaggcatgtctctgagcttctatacctgctcaaggtcagtg

SEQ ID NO: 3200 - DNA, 244 bp, Homo sapiens
acattttaaaaccaggccaaatctatttgccaagcagtgtatcactaataagaaaagcagtttttccttttattgcagtttttgtttatctgccatagaatttccttatactgtggcttggtattattcaagattagctatttcgctggtattacatctttttaaaagcctattataacatggttagcctataaggcagtgttggtccccttctaatattggcctcataaaggggttccactgt

SEQ ID NO: 3201 - DNA, 545 bp, Homo sapiens
actatctggtttgagagtgcccttgaaaatttcatactgcttagagtttcctttatttccgaacaaagaaactagtatgtgtcctgtaaccttttttccagacagtgtgacagataccttatacctccaacgtacaaaattactggcatcaccagtgtctagataaaatttctggcccacatcatttgttttcccaggatatctatcagcatagtgacccatctgtgggcagcctccacttggacaagggaaacacttgtttgcagtgaagacgttgtaagaggcacaggggaatccagcaaagccatcagggttgacgatgctatcagtgtaatatttgtagcttcttaagtgattacaggccgcaaagtctcgagtcccttcccagattccgtctatgtccacaatctgagagagaatgttctttttacatccaggcatttccactcctccatttggaaagaaatctaggtggcccacgacttggctcattccaaaccccaaattggggactatgggggcaccatccgtgtgaattacatcca

SEQ ID NO: 3202 - DNA, 331 bp, Homo sapiens; identical to SEQ ID NO: 3099

SEQ ID NO: 3203 - DNA, 230 bp, Homo sapiens
acgaacagcctctcttacaaaccactggcagaatgcaggagaaatccactctctggcatggaaaccacagtccatgaaaatggcaggcttattttgtccagctttgccaaccttcaggaggtaaatagcgcgtccctcaaatgtggttccgataacactgcgagagatgagggctggattctcagtggcgacttgttgagtccaagtctctatcgtttcccacttgttgt

SEQ ID NO: 3204 - DNA, 549 bp, Homo sapiens
ggaactgccacgatgctgccactttggactctttcactgctgctgggagcagtagcaggaaaagaagtttgctacgaaagactcggctgcttcagtgatgactccccatggtcaggaattacggaaagacccctccatatattgccttggtctccaaaagatgtcaacacccgcttcctcctatatactaatgagaacccaaacaactttcaagaagttgccgcagattcatcaagcatcagtggctccaatttcaaaacaaatagaaaaactcgctttattattcatggattcatagacaagggagaagaaaactggctagccaatgtgtgcaagaatctgttcaaggtggaaagtgtgaactgtatctgtgtggactggaaaggtggctcccgaactggatacacacaagcctcgcagaacatcaggatcgtgggagcagaagtggcatattttgttgaatttcttcagtcggcgttcggttactcaccttccaacgtgcatgtcattggccacagcctgggtgcccacgctgctggggaggctgga

SEQ ID NO: 3205 - DNA, 582 bp, Homo sapiens
  misc_feature 523: n = A,T,C or G
accagggggaccgggagggcctggggggccagctggtccaggatagcctgcgagtcctcctactgctactccagacttgacatcatatgaatcatactggggagaatagttctgaggaccagtagggcatgattcacagattccaggggggccaggagaaccaggggaccctggttgtcctggaataccagggtcaccatttctcccaggaataccaggagggcctggatctcccttggggccttgaggtccttgaccattaggagggcgagtaggagcagttggaggctgtgggcaaactgcacaacattctccaaatggaatttctgggttggggcagtctaattcttgatcgtcacatattatgtcatcgcagagaacggatcctgagtcacagacacatatttggcatggttctggcttccagacatctctatccgcatagggctgaccaagatgggaacatcctccttcaacagcttcctgttgtgccaaaataatagtgggatgaagcagagcgagnagtagccagctccccttttgcacaaagctcatcatgtctaaatatcagacatgagactc

SEQ ID NO: 3206 - DNA, 207 bp, Homo sapiens; identical to SEQ ID NO: 2996

SEQ ID NO: 3207 - DNA, 472 bp, Homo sapiens
cctagatttctttccaaatggaggagtggaaatgcctggatgtaaaaagaacattctctctcagattgtggacatagacggaatctgggaagggactcgagactttgcggcctgtaatcacttaagaagctacaaatattacactgatagcatcgtcaaccctgatggctttgctggattcccctgtgcctcttacaacgtcttcactgcaaacaagtgtttcccttgtccaagtggaggctgcccacagatgggtcactatgctgatagatatcctgggaaaacaaatgatgtgggccagaaattttatctagacactggtgatgccagtaattttgcacgttggaggtataaggtatctgtcacactgtctggaaaaaaggttacaggacacatactagtttctttgttcggaaataaaggaaactctaagcagtatgaaattttcaagggcactctcaaaccagatagt

SEQ ID NO: 3208 - DNA, 207 bp, Homo sapiens; identical to SEQ ID NO: 2996

SEQ ID NO: 3209 - DNA, 331 bp, Homo sapiens
acctatggacgtgagatccaagtgacagagcttctcaacaagttagacttttatgtcctgcctgtgctcaatattgatggctacatctacacctggaccaagagccgattttggagaaagactcgctccacccatactggatctagctgcattggcacagaccccaacagaaattttgatgctggttggtgtgaaattggagcctctcgaaacccctgtgatgaaacttactgcggacctgccgcagagtctgaaaaggagaccaaggccctggctgatttcatccgcaacaaattctcttccatcaaggcatatctgacaatccactcgt

SEQ ID NO: 3210 - DNA, 443 bp, Homo sapiens
  misc_feature 434: n = A,T,C or G
ctacatttgtgaaaattgtggtgccatgaattaagatggatgactggaaaaaggtgttggagaaagagttaaagatgaggaagagatatttttagtatatgaagttatccaggacttgatattcataattcagtgctgtggaaatgaaaaaaatgattgaagaggtggaacggaaatgaccttagggggaaaaaaaaggaccaaagaagtctgattaaaagttgaaatcagtatttctgaattcaaattgcttgaatttccaaaatagtcagtaaaggatctaatagaaccagaattatttgggtgaattctgcaggttttatgggcttgtcacaacgtgaagggctggaatgtatattaccaaatgggaatttccattgtaggtttttgctagtcccacccccattttagcctaatttggcttaaacgcagtntggggagaa

SEQ ID NO: 3211 - DNA, 477 bp, Homo sapiens
acaagtccagaaaagaaggagacgattaagttatttctggaaaaaatgagtgagcctttaatccgaaggagcagtttctctgaccgaaagttcagtgtaacttccagaggttcaatagatgatgtttttaactgcaatctgtcacccagatcatctctgacagagcctcttttggcagaattaccatttccaagtgttctggaatctgaagagacacccaaccaatttatctgattgaactgaacattgtagcagttgctcccgcactccaggcctgtgctagactataggctggggggagggtaggaggtgggaggcagatacttccacctgcgtgtcaatctccggctcctccatggcttctatggaggactcctctcttctgcttctgtggatgtgatgccctggcaggcccagggcagctgattcccctaaaacttatgattaccaggatggaaaggccttggtcccatggca

SEQ ID NO: 3212 - DNA, 523 bp, Homo sapiens
tggatcgacacgggcatccattcccgggagtgggtcacccaggccagtggggtctggtttgcaaagaagatcactcaagactacgggcaggatgcagctttcaccgccattctcgacaccttggacatcttcctggagatcgtcaccaaccctgatggctttgccttcacgcacagcacgaatcgcatgtggcgcaagactcggtcccacacagcaggctccctctgtattggcgtggaccccaacaggaactgggacgctggctttgggttgtccggagccagcagtaacccctgctcggagacttaccacggcaagtttgccaattccgaagtggaggtcaagtccattgtagactttgtgaaggaccatgggaacatcaaggccttcatctccatccacagctactcccagctcctcatgtatccctatggctacaaaacagaaccagtccctgaccaggatgagctggatcagctttccaaggctgctgtgacagccctggcctctctctacgggacca

SEQ ID NO: 3213 - DNA, 331 bp, Homo sapiens; identical to SEQ ID NO: 3099

SEQ ID NO: 3214 - DNA, 293 bp, Homo sapiens
actggaaactaacctcggccataattcactacatatgcattatcagaagacaattatcacactagccataccatggagttacacagctttcaaataatacctcttcaggttatttgtatttttatttaacaaagtaaatacagtgatactggtaggaaaataaagtgatcgtgatcagcagaacgcagacttccctaagaattatgagccaggaaccaagaaaacctccatcacggagaatgcattcttgaataccatcaacctacttgtctgtatgaggtataaatcctagt

SEQ ID NO: 3215 - DNA, 331 bp, Homo sapiens
acctatggacgtgagatccaagtgacagagcttctcaacaagttagacttttatgtcctgcctgtgctcaatattgatggctacatctgcacctggaccaagagccgattttggagaaagactcgctccacccatactggatctagctgcattggcacagaccccaacagaaattttgatgctggttggtgtgaaattggagcctctcgaaacccctgtgatgaaacttactgtggacctgccgcagagtctgaaaaggagaccaaggccctggctgatttcatccgcaacaaactctcttccatcaaggcatatctgacaatccactcgt

SEQ ID NO: 3216 - DNA, 282 bp, Homo sapiens
accaacacaagcctgcgcgtctgcagcagttgccctgtggggacctttaccaggcatgagaatggcatagagaaatgccatgactgtagtcagccatgcccatggccaatgattgagaaattaccttgtgctgccttgactgaccgagaatgcacttgcccacctggcatgttccagtctaacgctacctgtgccccccatacggtgtgtcctgtgggttggggtgtgcggaagaaagggacagagactgaggatgtgcggtgtaagcagtgtgctcggggt

SEQ ID NO: 3217 - DNA, 448 bp, Homo sapiens
  misc_feature 38, 59, 62, 64, 71, 106, 146, 164, 231, 278, 334, 336, 381,388, 401, 407: n = A,T,C or G
acaagctttttttttttttttttttttttttttttaanagcagggtcactttattggtntananactgcanagggaccaggggctttagctgttggcagctatggngtccttaatccagtccacatagttgtagaccttggtgtanactccaggcctgttcttntgggcacagccatagccccaggagacaattccttggagctctccattggagaccacagggccaccanaatcaccctggcaggaatccttgcctccctcgaggaagcccacacanaacatgttgttggtaatctttccagggtaggaggcttcacactcagcctggctcancncaggagcatccaggcactgcagctcgtctgggtagtcggcaccanaactcanagtgttgccccanccgganatgagggactcggtgccagcagctggaggggcagtgggcaa

SEQ ID NO: 3218 - DNA, 411 bp, Homo sapiens
acgccaacgccgccgacatcgactatatagcaggcaccaacaacatggacggccacatcttcgccagcatcgacatgcctgccatcaacaagggcaacaagaaagtcacggaggaggacttctacaagctggtcagtgagttcacaatcaccaaggggctcagaggcgccaagacgacctttgatgtctacactgagtcctgggcccaggacccatcccaggagaataagaagaagactgtggtggactttgagaccgatgtcctcttcctggtgcccaccgagattgccctagcccagcacagagccaatgccaagagtgccaagacctacgcctacctgttttcccatccctctcggatgcccgtctaccccaaatgggtgggggccgaccatgcagatgacattcagt

SEQ ID NO: 3219 - DNA, 557 bp, Homo sapiens
acaacaacctcaccaacgtggagggcaggatagagccaccgcctgggaagcacaacgacattgacgtgttcatgcctaccctcccagtgcccactgtagccatggaggtgcggccatcaccaagcacccccctggaggtccctctcaatgcctccagcaccaatgccacagaggatcacccagaaaccaatgccgtagatgaaccctacaaaatccatggcctggaagatgaagtccagccatccaacctaatccctcgacgaccgagcccctatgaaaagaccagaaaccaaagaatccaagagctcattgatgagatgcggaagaaagagatgctcggaaagttctaataaaatggaaagatagcatccctagcatttttttcttgcttatagagatattccatgggatagcaaatcctgtgtcatggagatgaagtcaaaattcctgattccaaaaggttttgagaaaacaaagagggggaatgacgtaagaaagataggcatgagcatgtggtaactaggttagcacgtgtgcttcccagcccaggagcgacc

SEQ ID NO: 3220 - DNA, 464 bp, Homo sapiens
gaaaactggctggccaatgtgtgcaagaatctgttcaaggtggaaagtgtgaactgtatctgtgtggactggaaaggtggctcccgaactggatacacacaagcctcgcagaacatcaggatcgtgggagcagaagtggcatattttgttgaatttcttcagtcggcgttcggctactcaccttccaacgtgcatgtcattggccacagcctgggtgcccacgctgctggggaggctggaaggagaaccaatgggaccattggacgcatcacagggttggacccagcagaaccttgctttcagggcacacctgaattagtccgattggaccccagcgatgccaaatttgtggatgtaattcacacggatggtgcccccatagtccccaatttggggtttggaatgagccaagtcgtgggccacctagatttctttccaaatggaggagtggaaatgcctggatg

SEQ ID NO: 3221 - DNA, 538 bp, Homo sapiens
  misc_feature 503: n = A,T,C or G
acctcaggcctgggcacctctttgcttgaaatatggcaagacttggaaaaatgtttgcccttagaatctatctcactactttagttagttgtctcctttgggcctgggcacagttctggcactgatctggaacaggctcccttttctaaaactgaacttgaccacatcaaaagtttgtaaaacaatctccatggtaattaaacttgcattcaacaccatatggtaacagaagatggcaaaggataagattcagatcttagatctttccaagtagggcatgttagatgatagaaggattagttgcaagctggatctgagctcaggcttgggcatgaaggaaactgtctcccatgtggtttggaagagttaggggctccctgagctctattgtgaactatacgggtttcatccaaggaatggtatgatgtgggcataaaaccattcttcagacaactgaagacggtccccttctgtagccagaaacactagctgtcctgcattgnccatttcctttagccccaggcggtcctgtgtgtac

SEQ ID NO: 3222 - DNA, 506 bp, Homo sapiens
acagtggcacgatcttggctcgctgcaacctctgcctccctgattcaagtgattctcgtgcttcagcctcccatgtagctgatattacaggcacttgccaccatacccggctaatttttgtatttttagtagagatggggtttcaccatgttgcccaggctggtcttgaactcctaacctcaggtgatccgcccgcctctgccttccaaggtgctgggattacaggcgtgagccactctgcccggcttatttttctttatgtttttgcttcgtaagaggttctgttgagcagtgatttgcaactcttgctgacgttgctggggaagctttaaaaaaaaaaagatgccccacagagattctgattttaattgttctgatttaattggcttggagtagaattcaggcattgatatctttaaaaactccccagtgttgagaaacaaatttagagagttgagaagtaggtatattaaattacagaatcttactgagttttggtagactga

SEQ ID NO: 3223 - DNA, 230 bp, Homo sapiens
acaacaagtgggaaccgatagaggcttggactcaacaagtcgccactgagaatccagccctcatctctcgcagtgttatcggaaccacatttgagggacgcgctatttacctcctgaaggttggcaaagctggacaaaataagccagccattttcatggactgtggtttccatgccagagagtggatttctcctgcattctgccagtggtttgtaagagaggctgttcgt

SEQ ID NO: 3224 - DNA, 331 bp, Homo sapiens
acctatggacgtgagatccaagtgacagagcttctcaacaagttagacttttatgtcctgcctgtgctcaatattgatggctacatctacacctggaccaagagccgattttggagaaagactcgctccacccatactggatctagctgcattggcacagaccccaacagaaattttgatgctggttggtgtgaaattggagcctctcgaaacccctgtgatgaaacttactgcggacctgccgcagagtctgaaaaggagaccaaggccctggctgatttcatccgcaacaaactctcttccatcaaggcatatctgacaatccactcgt

SEQ ID NO: 3225 - DNA, 526 bp, Homo sapiens
ggttactcaccttccaacgtgcatgtcattggccacagcctgggtgcccacgctgctggggaggctggaaggagaaccaatgggaccattggacgcatcacagggttggacccagcagaaccttgctttcagggcacacctgaattagtccgattggaccccagcgatgccaaatttgtggatgtaattcacacggatggtgcccccatagtccccaatttggggtttggaatgagccaagtcgtgggccacctagatttctttccaaatggaggagtggaaatgcctggatgtaaaaagaacattctctctcagattgtggacatagacggaatctgggaagggactcgagactttgcggcctgtaatcacttaagaagctacaaatattacactgatagcatcgtcaaccctgatggctttgctggattcccctgtgcctcttacaacgtcttcactgcaaacaagtgtttcccttgtccaagtggaggctgcccacagatgggtcactatgctgatagatatc

SEQ ID NO: 3226 - DNA, 423 bp, Homo sapiens
  misc_feature 272, 273, 276, 280, 281, 283, 285, 316, 318, 322, 343, 346,351, 352, 355, 366, 375, 377, 378, 380, 423: n = A,T,C or G
acaggtgttccaggacgcagctggcaacatacttgattgccaggaaggtctcctcgcaggtagcctggatctgggattctggaaggagaaagtcatatctgcctgtatctcgaagttcaaaggtgaaggaatatctgattccttggtcataagcccagtcgtcagagcccccagcagcaggatagattgttgtagctcccgggcaggtacaagcttttttttttttttttttttttttttttttttttttttttttttttttttttttgggnnggngganntncntttaattttaaattttacaatttaaattcancntganttgcaataaatggattttcancanagttnntantaaaaaaatgngctttgccntnntnaaaaacgtaaattttaatgcctgggcaattgccattaattttn

SEQ ID NO: 3227 - DNA, 324 bp, Homo sapiens
  misc_feature 277: n = A,T,C or G
caggcctttccggatggtccgcttgtgatcacagacacggaaaggtcgctggggtggtggagctgaggtccagaccctccgtccaaactccgagcttatattagatactgacctggtagttgagaagaaaagtcaagaaggggcgaggaggggcttggttagtgtaaagggcatgatgagggtagagtggctagagggctagggagggagagatctaggtttatcgattagggatgagggagagaccatggagtgcaggtgggggcgggtggctcangagcttgacaagcccactgtggagtggggagcaggagaggaaggggt

SEQ ID NO: 3228 - DNA, 337 bp, Homo sapiens
acatgttatagttcttctcgaagtcccgggccagcagctccacggggtggtctcctgcctccaggcgcttctcattctcatggatcttcttcacccgcagcttctgcttctcagtcagaaggttgttgtcctcatccctctcatacagggtgaccaggacgttcttgagccagtcccgcatgcgcagggggaattcggtcagctcagagtccaggcaaggggggatgtatttgcaaggcccgatgtagtccaggtggagcttgtggcccttcttggtgccctccagggtgcactttgtggcaaagaagtggcaggaagagtcgaaggtcttgttgtc

SEQ ID NO: 3229 - DNA, 589 bp, Homo sapiens
  misc_feature 38, 83, 87, 499: n = A,T,C or G
tccaggtgtaagcggtggtggttatgactttggttacnatggagacttctacagggctgaccagcctcgctcagcaccttctntcanacccaaggactatgaagttgatgctactctgaagtctctcaacaaccagattgagacccttcttactcctgaaggctctagaaagaacccagctcgcacatgccgtgacttgagactcagccacccagagtggagcagtggttactactggattgaccctaaccaaggatgcactatggatgctatcaaagtatactgtgatttctctactggcgaaacctgtatccgggcccaacctgaaaacatcccagccaagaactggtataggagctccaaggacaagaaacacgtctggctaggagaaactatcaatgctggcagccagtttgaatataatgtagaaggagtgacttccaaggaaatggctacccaacttgccttcatgcgcctgctggccaactatgcctctcanaacatcacctaccactgcaagaacagcattgcatacatggatgaggagactggcaacctgaaaaaggctgtcattctacagggctctaat

SEQ ID NO: 3230 - DNA, 435 bp, Homo sapiens
actataggtgaacttttagctcctgcagctccttttgacaagaaatgtggtcgtgaaaattggactgttgcttttgctccagatggttcatactttgcttggtcacaaggacatcgcacagtaaagcttgttccgtggtcccagtgccttcagaactttctcttgcatggcaccaagaatgttaccaattcaagcagtttaagattgccaagacaaaatagtgatggtggtcagaaaaataagcctcgtgaacatattatagactgtggagatatagtctggagtcttgcttttgggtcatcagttccagaaaaacagagtcgctgtgtaaatatagaatggcatcgcttcagatttggacaagatcagctacttcttgctacagggttgaacaatgggcgtatcaaaatatgggatgtatatacaggaaaactc

SEQ ID NO: 3231 - DNA, 331 bp, Homo sapiens
acgagtggattgtcggatatgccttgatggaagagagtttgttgcggatgaaatcagccagggccttggtctccttttcagactctgcggcaggtccacagtaagtttcatcacaggggtttcgagaggctccaatttcacaccaaccagcatcaaaatttctgttggggtctgtgccaatgcagctagatccagtatgggtggagcgagtctttctccaaaatcggctcttggtccaggtgtagatgtagccatcaatattgagcacaggcaggacataaaagtctaacttgttgagaagctctgtcacttggatctcacgtccataggt

SEQ ID NO: 3232 - DNA, 497 bp, Homo sapiens
  misc_feature 38, 49, 62, 64, 71, 106, 119, 134, 164, 179, 231, 278, 316,334, 361, 364, 381, 401, 430, 443, 452, 454, 493: n = A,T,C or G
acaagctttttttttttttttttttttttttttttaanagcagggtcantttattggtatananactgcanagggaccaggggctttagctgttggcagctatggngtccttaatccantccacatagttgtanaccttggtgtaaactccaggcctgttcttntgggcccagccatanccccaggagacaattccttggagctctccattggagaccacagggccaccanaatcaccctggcaggaatccttgcctccctcgaggaagcccacacanaacatgttgttggtaatctttccagggtaggaggcttnacactcagcctggctcancacaggagcatccaggcactgcagctngtntgggtagtcggcaccanaactcaaagtgttgccccanccggaaatgagggactcggtgccaaccancttggaggggcantgggcaaananatggcggacacccgggaattgatgacggcaggtgagganagct

SEQ ID NO: 3233 - DNA, 275 bp, Homo sapiens
  misc_feature 100, 200, 210, 233: n = A,T,C or G
gccaagaggaaggccaagtcgagggccaagacgaagacatcccaccaatcacctgaggccgttctgtacaagctttttttttttttttttttttttttgncttttcatgctaaatttttatttcaatgttatgcaactgcataagtataaatattttgttcaatatacaacaattatgacgtccataaggaatttcttanagaaaataanactgcaaacactttattgcacanatcctaacaaacttttaagctggtaaatctacagctgggagt

SEQ ID NO: 3234 - DNA, 532 bp, Homo sapiens
caacagagattgctgatttgctccttaagcaagagattcactgccgctaagcatggctcagaccaactcgttcttcatgctgatctcctccctgatgttcctgtctctgagccaaggccaggagtcccagacagagctgcctaatccccgaatcagctgcccagaaggcaccaatgcctatcgctcctactgctactactttaatgaagaccctgagacctgggttgatgcagatctctattgccagaacatgaattcaggcaacctggtgtctgtgctcacccaggcggagggtgccttcgtggtctcactgattaaggagagtagcactgatgacagcaatgtctggattggcctccatgacccaaaaaagaaccgccgctggcactggagtagtgggtccctggtctcctacaagtcctgggacactggatccccgagcagtgctaatgctggctactgtgcaagcctgacttcatgctcaggattcaagaaatggaaggatgaatcttgtgagaagaagttctccttt

SEQ ID NO: 3235 - DNA, 175 bp, Homo sapiens
  misc_feature 3, 13, 28, 44, 76, 97, 141, 148, 164: n = A,T,C or G
cgncaaccctganggctttgctggattnccctgtgcctcttacnacgtcttcactgcaaacaagtgtttcccttgnccaagtggaggctgcccacanatgggtcactatgctgatagatatcctgggaaaacaaatgatgngggccanaaattttatctagacnctggtgatgcc

SEQ ID NO: 3236 - DNA, 453 bp, Homo sapiens
  misc_feature 85, 163, 165, 219, 220, 435: n = A,T,C or G
gacgcatcacagggttggacccagcagaaccttgctttcagggcacacctgaattagtccgattggatcccagcgatgccaaatntgtggatgtaattcacacggatggtgcccccatagtccccaatttggggtttggaatgagccaagtcgtgggccaccnanatttctttccaaatggaggagtggaaatgcctggatgtaaaaagaacattctcnntcagattgtggacatagacggaatctgggaagggactcgagactttgcggcctgtaatcacttaagaagctacaaatattacactgatagcatcgtcaaccctgatggctttgctggattcccctgtgcctcttacaacgtcttcactgcaaacaagtgtttcccttgtccaagtggaggctgcccacagatgggtcactatgctgatagatatnctgggaaaacaaatgatg

SEQ ID NO: 3237 - DNA, 134 bp, Homo sapiens
  misc_feature 4, 7, 15, 55, 58, 61: n = A,T,C or G
gacnganctgccacnatgctgccactttggactctttcactgctgctgggagcantancangaaaagaagtttgctacaaaagactcggctgcttcagtgatgactccccatggtcaggaattacggaaagacc

SEQ ID NO: 3238 - DNA, 257 bp, Homo sapiens
gctccggctgctcagttccctcctccttgtggccgttgcctcaggctatggcccaccttcctctcgcccttccagccgcgttgtcaatggtgaggatgcggtcccctacagctggccctggcaggtttccctgcagtatgagaaaagtggaagcttctaccacacgtgtggcggtagcctcatcgcccccgactgggttgtgactgccggccactgcatctcgagctcctggacctaccaggtggtgttgggcgagt

SEQ ID NO: 3239 - DNA, 485 bp, Homo sapiens
acccataggggaacatcagcagctgggaatagctgtggagggtaatgaaggccttgacttttccatgactcttgatgaagtccactatggatttcacttcaacttcagagttggcactgggtccgtggtatgaatcagagcaagggttgctgctggctccaggtcctccaaaacctgcatcccagttccggttaggatccacaccaacacagaggcttccagataccttggaccgggtcttccgccacatacgatttttggtttgagagaacacgtatccatcagggtttgtgactggcaggaggaagatatccagggcatccagaatggaagtgatggatgggtcctttccataatcagaaacaatcttatttgctgtccaaagtgccgtagcttgtgtaacccactctcgagcatggatcccagcatccagccagatagctggcttgtctcctccggtgctgaacttgagcacgttcataggc

SEQ ID NO: 3240 - DNA, 490 bp, Homo sapiens
caactttcaagaagttgccgcagattcatcaagcatcagtggctccaatttcaaaacaaatagaaaaactcgctttattattcatggattcatagacaagggagaagaaaactggctggccaatgtgtgcaagaatctgttcaaggtggaaagtgtgaactgtatctgtgtggactggaaaggtggctcccgaactggatacacacaagcctcgcagaacatcaggatcgtgggagcagaagtggcatattttgttgaatttcttcagtcggcgttcggttactcaccttccaacgtgcatgtcattggccacagcctgggtgcccacgctgctggggaggctggaaggagaaccgatgggaccattggacgcatcacagggttggacccagcagaaccttgctttcagggcacacctgaattagtccgattggaccccagcgatgccaaatttgtggatgtaattcacacggatggtgcccccatagtc

SEQ ID NO: 3241 - DNA, 243 bp, Homo sapiens
  misc_feature 30, 200, 234: n = A,T,C or G
acctatggacgtgagatccaagtgacagancttctcaacaagttagacttttatgtcctgcctgtgctcaatattgatggctacatctacacctggaccaagagccgattttggagaaagactcgctccacccatactggatctagctgcattggcacagaccccaatagaaattttgatgctggttggtgtgccattgnagcctctcgaaacccctgtgatgaaacttactgnggacctgcc

SEQ ID NO: 3242 - DNA, 420 bp, Homo sapiens
acttgatgccctggctgtaggtccagtcaatagtgcttccactggcttgatctggggcaggagtaaaataggagagaaagggtcaatcactttgggaatatttacacgggttgggttaacgatccaaccctgtccaaagctctgtgccttgtgcaatgctgagtggagtcagtgtctactaaggtctgctgttgaccaagcagcctcacttccaagaaactcccactaaaaggtctaagccaagaggtccaaagaggagaccagcaatggttcccctattcactaggggatgcaaggaagtctctgcaattgcacaagcccctctgaaaacagcctctgtccaacagccctttcggtgaagcccctaaatataccgagttccctgcttgggtaaccaggatttgttcccctggggctctg

SEQ ID NO: 3243 - DNA, 331 bp, Homo sapiens; identical to SEQ ID NO: 3099

SEQ ID NO: 3244 - DNA, 574 bp, Homo sapiens
ctacatttgtgaaaattgtggtgccatgaattaagatggatgactggaaaaaggtgttggagaaagagttaaagatgaggaagagatatttttagtatatgaagttatccaggacttgatattcataattcagtgctgtggaaatgaaaaaaatgattgaagaggtggaacggaaatgaccttagggggaaaaaaaaggaccaaagaagtctgattaaaagttgaaatcagtatttctgaattcaaattgcttgaatttccaaaatagtcagtaaaggatctaatagaaccagaattatttgggtgaattctgcaggttttatgggcttgtcacaacgtgaagggctggaatgtatattaccaaatgggaatttccattgtaggtttttgctagtcccacccccattttagcctaatttggcttaaacgcagtatggggagaattgttcccattccatgtgttctgaattcagctcatctcccagcatatagatatatcctcctttaactccgaccagaacccttcttcctgtggcactccccacccatagaccttcagatcatctcccacacc

SEQ ID NO: 3245 - DNA, 552 bp, Homo sapiens
actgaagatcagcgatgcaaactcattagggaggagatggtctgaactgagttggagacatagtctagtttaatttttgacttcatagtaattgcaggaccagttctagacatccatttttcagcttcctctagtttttgaacttgcaaacaaaggagaacttcttctcacaagattcatccttccatttcttgaatcctgagcatgaagtcaggcttgcacagtagccagcattagcactgctcggggatccagtgtcccaggacttgtaggagaccagggacccactactccagtgccagcggcggttctttttgggtcatggaggccaatccagacattgctgtcatcagtgctactctccttaatcagtgaggccacgaaggcaccctccgcctgggtgagcacagacaccaggttgcctgaattcatgttctggcaatagagatctgcatcaacccaggtctcagggtcttcattaaagtagtagcagtaggagcgataggcattggtgccttctgggcagctgattcggggattaggcagctctgt

SEQ ID NO: 3246 - DNA, 207 bp, Homo sapiens; identical to SEQ ID NO: 2996

SEQ ID NO: 3247 - DNA, 295 bp, Homo sapiens
  misc_feature 31, 46, 220, 242, 268: n = A,T,C or G
acaagcttttttttttttttttttttttttnggaattttctgaganatctttattctttattcaggatgtgggatcgatcagcactgccagctgggccttggttctagtggcttgctatggtctcctcaatccagtcgatgaaggcggagactcgagtgaacaccgtgggcttccagatgaagttgcagccaaagccagaaacaaagctggtcacaccgnggacctgccagccaccatcctntgtggggcagttgaggggtcctccanagtcaccgttgcagccggagcggatgt

SEQ ID NO: 3248 - DNA, 392 bp, Homo sapiens
cgactatatagcaggcaccaacaacatggacggccacatcttcgccagcatcgacatgcctgccatcaacaagggcaacaagaaagtcacggaggaggacttctacaagctggtcagtgagttcacaatcaccaaggggctcagaggcgccaagacgacctttgatgtctacaccgagtcctgggcccaggacccatcccaggagaataagaagaagactgtggtggactttgagaccgatgtcctcttcctggtgcccaccgagattgccctagcccagcacagagccaatgccaagagtgccaagacctacgcctacctgttttcccatccctctcggatgcccgtctaccccaaatgggtgggggccgaccatgcagatgacattcagt

SEQ ID NO: 3249 - DNA, 189 bp, Homo sapiens
  misc_feature 89, 105, 139, 177: n = A,T,C or G
acaagctttttttttttttttttttttttttttttaacaactgcacaaaggctgtattgcaggggaggtgggagggggcaggcaaaacnctcctcctcctgggtnttggggccccggagcaaaacccagggatgggctnagtgaggggcttggcaccctgtggaagctgcagatganagaccagcaatg

SEQ ID NO: 3250 - DNA, 486 bp, Homo sapiens
ggacaaggcacttaccaacagagattgctgatttgctccttaagcaagagattcactgccgctaagcatggctcagaccaactcgttcttcatgctgatctcctccctgatgttcctgtctctgagccaaggccaggagtcccagacagagctgcctaatccccgaatcagctgcccagaaggcaccaatgcctatcgctcctactgctactactttaatgaagaccctgagacctgggttgatgcagatctctattgccagaacatgaattcaggcaacctggtgtctgtgctcacccaggcggagggtgccttcgtggcctcactgattaaggagagtagcactgatgacagcaatgtctggattggcctccatgacccaaaaaagaaccgccgctggcactggagtagtgggtccctggtctcctacaagtcctgggacactggatccccgagcagtgctaatgctggctactgtgcaagcct

SEQ ID NO: 3251 - DNA, 200 bp, Homo sapiens
acggcagcatcccaggctgtggagccagttgcctcttgccgcatgtgattcaccagcaggagacgcatgcaccctgtggaaagggaagctgggcatcacagcatgctttttaattggctttaacatttcattaagtaagagtgactcattcctgcaaggctttaaagaggttcatttctgagtatcctctccacgattct

SEQ ID NO: 3252 - DNA, 213 bp, Homo sapiens; identical to SEQ ID NO: 3148

SEQ ID NO: 3253 - DNA, 288 bp, Homo sapiens
  misc_feature 143, 148, 160, 170, 235, 261: n = A,T,C or G
acaagctttttttttttttttttttttttttttggggggatctttattctttattcaggatgtgggatcgatcagcactgccagctgggccttggttctagtggcttgctatggtctcctcaatccagtcgatgaaggcgganactcnagtgaacaccgngggcttccanatgaagttgcagccaaagccagaaacaaagctggtcacaccgtggacctgccagccaccatcctntgtggggcagttgaggggtcctccanagtcaccgttgcagccggagcggatgt

SEQ ID NO: 3254 - DNA, 330 bp, Homo sapiens
acctatggacgtgagatccaagtgacagagcttctcaacaagttagacttttatgtcctgcctgtgctcaatattgatggctacatctacacctggaccaagagccgattttggagaaagactcgctccacccatactggatctagctgcattggcacagaccccaacagaaattttgatgctggttggtgtgaaattggagcctctcgaaacccctgtgatgaaacttactgtggacctgccgcagagtctgaaaaggagaccaaggccctggctgatttcatccgcaacaactctcttccatcaaggcatatctgacaatccactcgt

SEQ ID NO: 3255 - DNA, 278 bp, Homo sapiens
actgaagatcagcgatgcaaactcattagggaggagatggtctgaactgagttggagacatagtctagtttaatttttgacttcatagtaattgcaggaccagttctagacatccatttttcagcttcctctagtttttgaacttgcaaacaaaggagaacttcttctcacaagattcatccttccatttcttgaatcctgagcatgaagtcaggcttgcacagtagccagcattagcactgctcggggatccagtgtcccaggacttgtaggagacc

SEQ ID NO: 3256 - DNA, 331 bp, Homo sapiens
acgagtggattgtcagatatgccttgatggaagagagtttgttgcggatgaaatcagccagggccttggtctccttttcagactctgcggcaggtccacagtaagtttcatcacaggggtttcgagaggctccaatttcacaccaaccagcatcaaaatttctgttggggtctgtgccaatgcagctagatccagtatgggtggagcgagtctttctccaaaatcggctcttggtccaggtgtagatgtagccatcaatattgagcacaggcgggacataaaagtctaacttgttgagaagctctgtcacttggatctcacgtccataggt

SEQ ID NO: 3257 - DNA, 257 bp, Homo sapiens
gctccggctgctcagttccctcctccttgtggccgttgcctcaggctatggcccaccttcctctcactcttccagccgcgttgtccatggtgaggatgcggtcccctacagctggccctggcaggtttccctgcagtatgagaaaagtggaagcttctaccacacgtgtggcggtagcctcatcgcccccgattgggttgtgactgccggccactgcatctcgagggatctgacctaccaggtggtgttgggtgagt

SEQ ID NO: 3258 - DNA, 331 bp, Homo sapiens; identical to SEQ ID NO: 2994

SEQ ID NO: 3259 - DNA, 342 bp, Homo sapiens
accaagcaatgaagaacaaattaaaaatctgctacaattggaggctcaagaacatctccagcttgatttttggaaatcacccaccaccccaggggagacagcccacgtccgagttcccttcgtcaacgtccaggcagtcaaagtgttcttggagtcccagggaattgcctattccatcatgattgaagacgtgcaggtcctgttggacaaagagaatgaagaaatgctttttaataggagaagagaacggagtggtaacttcaattttggggcctaccataccctggaagagatttcccaagaaatggataacctcgtggctgagcaccctggtctagtgag

SEQ ID NO: 3260 - DNA, 428 bp, Homo sapiens
ctctttcactgctgctgggagcagtagcaggaaaagaagtttgctacgaaagactcggctgcttcagtgatgactccccatggtcaggaattacggaaagacctctccatatattgccttggtctccaaaagatgtcaacacccgcttcctcctatatactaatgagaacccaaacaactttcaagaagttgccgcagattcatcaagcatcagtgtctccaatttcaaaacaaatagaaaaactcgctttattattcatggattcatagacaagggagaagaaaactggctggccaatgtgtgcaagaatctgttcaaggtggaaagtgtgaactgtatctgtgtggactggaaaggtggctcccgaactggatacacacaagcctcgcagaacatcaggatcgtgggagcagaagtggcatatttt

SEQ ID NO: 3261 - DNA, 275 bp, Homo sapiens
ctaatacgactcactatagggcagcgtggtgcggccgaggtactgggactgtctcgagggcaagaagagcaagcacgcgcccagaggcacccacctgtgggagttcatccgggacatcctcatccacccggagctcaacgagggcctcatgaagtgggagaatcggcatgaaggcgtcttcaagttcctgcgctccgaggctgtggcccaactatggggccaaaagaaaaagaacagcaacatgacctacgagaagctgagccgggccatgaggt

SEQ ID NO: 3262 - DNA, 190 bp, Homo sapiens
ctctggtgcagcatgatgctgcccccttggaccctcggccttctcctgctggccacagtcagaggaaaagaggtctgctacggacaacttggctgcttttctgatgaaaaaccgtgggcaggaacccttcagcgacctgtaaaattacttccctggtcccccgaggacattgacacccgctttcttctgt

SEQ ID NO: 3263 - DNA, 539 bp, Homo sapiens
gtgaaggtggacaaatgtttgctgggaggcctgggtttgggggaggaggtcattgcctacctgcgagacccaaactgcagcagcatcttgcagacagaggagaggaactgggtatctgtgaccagccccgtccaggctagtgcctgcaggaacattctggagttttttgcctggtttcctcattcgccttcccataaagtgtcagtaacactgaaggaagaggtcccttgacctccatgagctcagaagagaaatcaaacccatgccatctacaaaaacaccctctccttggtcaatgatttcatcatcagagacaccatcctcaacatcaacttccaatgtgcctacccactggacatgaaagtcagcctccaagctgccttgcagcccattgtaagttccctgaacgtcagtgtggacgggaatggagagttcattgtcaggatggccctcttccaagaccagaactacacgaatccttacgaaggggatgcagttgaactgtctgttgagtccgtgctgtatgtgggtgccatctt

SEQ ID NO: 3264 - DNA, 213 bp, Homo sapiens; identical to SEQ ID NO: 3148

SEQ ID NO: 3265 - DNA, 451 bp, Homo sapiens
acctatggacgtgagatccaagtgacagagcttctcaacaagttagacttttatgtcctgcctgtgctcaatattgatggctacatctacacctggaccaagagccgattttggagaaagactcgctccacccatactggatctagctgcattggcacagaccccaacagaaattttgatgctggttggtgtgaaattggagcctctcgaaacccctgtgatgaaacttactgtggacctgccgcagagtctgaaaaggagaccaaggccctggctgatttcatccgcaacaaactctcttccatcaaggcatatctgacaatccactcgtactcccaaatgatgatctacccttactcatatgcttacaaactcggtgagaacaatgctgagttgaatgccctggctaaagctactgtgaaagaacttgcctcactgcacggcaccaagt

SEQ ID NO: 3266 - DNA, 558 bp, Homo sapiens
ggaactgccacgatgctgccactttggactctttcactgctgctgggagcagtagcaggaaaagaagtttgctacgaaagactcggctgcttcagtgatgactccccatggtcaggaattacggaaagacccctccatatattgccttggtctccaaaagatgtcaacacccgcttcctcctatatactaatgagaacccagacaactttcaagaagttgccgcagattcatcaagcatcagtggctccaatttcaaaacaaatagaaaaactcgctttattattcatggattcatagacaagggagaagaaaactggctggccaatgtgtgcaagaatctgttcaaggtggaaagtgtgaactgtatctgtgtggactggaaaggtggctcccgaactggatacacacaagcctcgcagaacatcaggatcgtgggagcagaagtggcatattttgttgaatttcttcagtcggcgttcggttactcaccttccaacgtgcatgtcattggccacagcctgggtgcccacgctgctggggaggctggaaggagaacc

SEQ ID NO: 3267 - DNA, 209 bp, Homo sapiens
actccactttataaaaagaaagaacttaaccaactagaagacaaatatgacaaagactacctcagtggtgaactgggtgataatctgaagatgaaaatccaggttttgcttcattaattcaccatccagagaccaaataattaaaagaaaaacaaatatagataggtagaactatattttcccccaatcagaatcatcatatcataggt

SEQ ID NO: 3268 - DNA, 207 bp, Homo sapiens; identical to SEQ ID NO: 2996

SEQ ID NO: 3269 - DNA, 408 bp, Homo sapiens
actaaaatgttcttagcagctttgtaatttctaaaaactggaattcaaatgtccatcaataagtgaatggataaactgtgggataaccacaatcaatatataataaaaagtattgatacttgctactttatggatgaatctcaattatgctgactgaaataagccagccctcctccactcctgaagggtccctactgtatgattccacttatgcaaaattttagaaagtgcaaaactaatctctcatgacagaatgcaatggttccctggggatggacggtatgaaggggcaggagacaagatcacaaaggaacatgagggacttctggagatttaggttatgttcactatcttgattgtgatgatggcttcctgtgtatatatgtatcttaaaatctatgaaactgt

SEQ ID NO: 3270 - DNA, 513 bp, Homo sapiens
ccacgatgctgccactttggactctttcactgctgctgggagcagtagcaggaaaagaagtttgctacgaaagactcggctgcttcagtgatgactccccatggtcaggaattacggaaagacccctccatatattgccttggtctccaaaagatgtcaacacccgcttcctcctatatactaatgagaacccaaacaactttcaagaagttgccgcagattcatcaagcatcagtggctccaatttcaaaacaaatagaaaaactcgctttattattcatggattcatagacaagggagaagaaaactggctggccaatgtgtgcaagaatctgttcaaggtggaaagtgtgaactgtatctgtgtggactggaaaggtggctcccgaactggatacacacaagcctcgcagaacatcaggatcgtgggagcagaagtggcatattttgttgaatttcttcagtcggcgttcggttactcaccttccaacgtgcatgtcattggccacagcc

SEQ ID NO: 3271 - DNA, 272 bp, Homo sapiens
gatgaaactccttgtgctagctgtgctgctcacagtggccgccgccgacagcggcatcagccctcgggccgtgtggcagttccgcaaaatgatcaagtgcgtgatcccggggagtgaccccttcttggaatacaacaactacggctgctactgtggcttggggggctcaggcacccccgtggatgaactggacaagtgctgccagacacatgacaactgctatgaccaggccaagaagctggacagctgtaaatttctgctggacaacccgt

SEQ ID NO: 3272 - DNA, 75 bp, Homo sapiens
  misc_feature 12, 25, 67: n = A,T,C or G
actcattccaangaatttgactcanatgtggatgttggggacttgcaaatggttaaatttatttggnataacaat

SEQ ID NO: 3273 - DNA, 347 bp, Homo sapiens
ggcatattttgttgaatttcttcagtcggcgttcggttactcaccttccaacgtgcatgtcattggccacagcctgggtgcccacgctgctggggaggctggaaggagaaccaatgggaccattggacgcatcgcagggttggacccagcagaaccttgctttcagggcacacctgaattagtccgattggaccccagcgatgccaaatttgtggatgtaattcacacggatggtgcccccatagtccccaatttggggtttggaatgagccaagtcgtgggccacctagatttctttccaaatggaggagtggaaatgcctggatgtaaaaagaacattctctctc

SEQ ID NO: 3274 - DNA, 396 bp, Homo sapiens
atcccaaactcagccaagagcaaagcaaacactccagccttatctgggcagggttgtgtggagactgactataagactatacctgagactggtcatctcagttcttttctcaccttgactgcaagatgaaactccttgtgctagctgtgctgctcacagtggccgccgccgacagcggcatcagccctcgggccgtgtggcagttccgcaaaatgatcaagtgcgtgatcccggggagtgaccccttcttggaatacaacaactacggctgctactgtggcttggggggctcaggcacccccgtggatgaactggacaagtgctgccagacacatgacaactgctatgaccaggccaagaagctggacagctgtaaatttctgctggacaacccgt

SEQ ID NO: 3275 - DNA, 310 bp, Homo sapiens
ccgagcggccgcccggcaggtacatttacaaagatgcgttcaaatagtgctctaagagttttgttcagtggctcacttcggctaaaatgcagaaatgcatgctgtcagcgttggtatttcacattcaatggagctgaatgttcaggacctcttcccattgaagctataatttatttggaccaaggaagccctgaaatgaattcaacaattaatattcatcgcacttcttctgtggaaggactttgtgaaggaattggtgctggattagtggatgttgctatctgggttggcacttgttcagattacccaa

SEQ ID NO: 3276 - DNA, 478 bp, Homo sapiens
  misc_feature 433: n = A,T,C or G
acctagtcagatggtagacgagctgtctgctgccgcaggagcacctctatacaggacttagaagtagtatgttattcctggttaagcaggcattgctttgccctggagcagctattttaagccatctcagattctgtctaaaggggttttttgggaagacgttttctttatcgccctgagaagatctaccccagggagaatctgagacatcttgcctacttttctttattagctttctcctcattcatttcttttatacctttcctttttggggagttgttatgccatgatttttggtatttatgtaaaaggattattactaattctatttctctatgtttattctagttaaggaaatgttgagggcaagccaccaaattacctaggctgaggttagagagattggccagcaaaaactgtgggaagatgaacntttgtcattatgatttcattatcacatgattatagaaggctgtct

SEQ ID NO: 3277 - DNA, 214 bp, Homo sapiens
  misc_feature 196: n = A,T,C or G
acacatatggcccgggagctacaacaatctatcctgctgctgggggctctgacgactgggcttatgaccaaggaatcagatattccttcacctttgaacttcgagatacaggcagatatggctttctccttccagaatcccagatccgggctacctgcgaggagaccttcctggcaatcaagtatgttgccagctncgtcctggaacacctgtc

SEQ ID NO: 3278 - DNA, 377 bp, Homo sapiens
actatctggtttgagagtgcccttgaaaatttcatactgcttagagtttcctttatttccgaacaaagaaactagtatgtgtcctgtaaccttttttccagacagtgtgacagataccttatacctccaacgtgcaaaattactggcatcaccagtgtctagataaaatttctggcccacatcatttgttttcccaggatatctatcagcatagtgacccatctgtgggcagcctccacttggacaagggaaacacttgtttgcagtgaagacgttgtaagaggcacaggggaatccagcaaagccatcagggttgacgatgctatcagtgtaatatttgtagcttcttaagtgattacaggccgcaaagtctcgag

SEQ ID NO: 3279 - DNA, 224 bp, Homo sapiens
acagagtcttttgcttcctcccacccctagggggaaaaactgctttgtgctttgggaagttgtctctgaaacccggggacagaggacgcaggacagactaggagggagccgggaggatgggctgcagctgtggaggagggtttcagaggagagaggtcggagagcagaggcctgagaagccagaggcaggtggagagagggtggaaagtgagcagcgggctggg

SEQ ID NO: 3280 - DNA, 112 bp, Homo sapiens
accataaacgactatataaatattacaaatttaaaaggctgtaaagcatgggcagataggttttattttcaaaatgctgttcttaacacaaaaataaaggctttactattta

SEQ ID NO: 3281 - DNA, 311 bp, Homo sapiens
acagaaatagatgcaataagtgtggtgagtctttgagcctacgagtcatgccaccagccataagttgacctatcacttgagaacctcctcagcaaagatgccagaaaacattcaatcaagttggcaaatgacacagggagctggccctctgaccatcttcctggcaaacctggactggaagggccatttgcagcactgtcctggagctaatacactgtttcactgcctctgccatataatgatgccagcactagccagctggtgggtatttggaggaatcctgcatgaggattgcccaataaggggcaggt

SEQ ID NO: 3282 - DNA, 381 bp, Homo sapiens
  misc_feature 40, 73, 108, 148, 280, 336: n = A,T,C or G
ttgtacaagctttttttttttttttttttttttttggganagcagggtcactttattggtatagagactgcanagggaccaggggctttagctgttggcagctatggngtccttaatccagtccacatagttgtagaccttggtgtanactccaggcctgttcttctgggcacagccatagccccaggagacaattccttggagctctccattggagaccacaaggccaccagaatcaccctggcaggaatccttgcctccctcgaggaagcccacacanaacatgttgttggtaatctttccagggtaggaggcttcacactcagcctggctcancacaggagcatccaggcactgcagctcgtctgggtagtcggcacc

SEQ ID NO: 3283 - DNA, 500 bp, Homo sapiens
gccagtatgcacagctttcctccactgctgctgctgctgttctggggtgtggtgtctcacagcttcccagcgactctagaaacacaagagcaagatgtggacttagtccagaaatacctggaaaaatactacaacctgaagaatgatgggaggcaagttgaaaagcggagaaatagtggcccagtggttgaaaaattgaagcaaatgcaggaattctttgggctgaaagtgactgggaaaccagatgctgaaaccctgaaggtgatgaagcagcccagatgtggagtgcctgatgtggctcagtttgtcctcactgaggggaaccctcgctgggagcaaacacatctgacctacaggattgaaaattacacgccagatttgccaagagcagatgtggaccatgccattgagaaagccttccaactctggagtaatgtcacacctctgacattcaccaaggtctctgagggtcaagcagacatcatgatatcttttgtcag

SEQ ID NO: 3284 - DNA, 225 bp, Homo sapiens
accagcagcaccaggtggcccaggaggaccagcagcaccctttcctccttcgggaccagggggaccagctccacctctaagtcctggggcccctgccaatccaggaggtccacgttcaccaggggcaccagcatcacccttgcctcctggagctccaggtgcaccggcatcaccctttggacctggttccccaggttttccattttctcctggaggaccacctgt

SEQ ID NO: 3285 - DNA, 438 bp, Homo sapiens
  misc_feature 19, 83, 139, 220, 302, 394, 427: n = A,T,C or G
acccataggggaacatcancagcttgggaatagctgtggagggtaatgaaggccttgacttttccatgactcttgatgaagtncactatggatttcacttcaacttcagagttggcactgggtccgtggtatgaatcanagcaagggttgctgctggctccaggtcctccaaaacctgcatcccagttccggttaggatccacaccaacacagaggcttncagataccttggaccgggtcttccgccacatacgatttttggtttgagagaacacgtatccatcagggtttgtgactggcangaggaagatatccagggcatccagaatggaagtgatggatgggtcctttccataatcagaaacaatcttatttgctgtccaaagtgccgtancttgtgtaacccactctcgagcatggatcccancatccagccag

SEQ ID NO: 3286 - DNA, 80 bp, Homo sapiens; identical to SEQ ID NO: 3121

SEQ ID NO: 3287 - DNA, 252 bp, Homo sapiens
acaatcaagtgatattttgtagccagccatttggtgccactgggcttcatgctcatgctgtgaagagcaaatgtgaaatatcatgaaatataaatcagaaaatctcaggttcctgcaccaaaatcattaagtagtatgaaaaggattgaagaaggctttgtcccatccctgaacaatgtcaacctctgtaatacaactcaaattatttcattttgtttttaaaatatagtcagcagtcaatacatttcaagt

SEQ ID NO: 3288 - DNA, 300 bp, Homo sapiens
  misc_feature 268, 282, 294: n = A,T,C or G
actcattccaatgaatttgactcagatgtggatgttggggacttgcagatggttaaatttatttggtataacaatgtgatcaacccaactttacctagagtgggagcatccaagattatagtggagacaaatgttggaaaacagttcaacttctgtagtccagaaaccgtcagggaggaagttctgctcaccctcacaccgtgttaggagactactgttatttgaccaatgaattgacttctaataaaatctagtggtgatgcaattnaaaaaaaaaaaaanaaaaaaaaaaangcttgt

SEQ ID NO: 3289 - DNA, 213 bp, Homo sapiens
acacatatggcccgggagctacaacaatctatcctgctgctgggggctctgacgactgggcttatgaccaaggaatcagatattccttcacctttgaacttcgagatacaggcagatatggctttctccttccagaatcccagatccgggctacctgcgaggagaccttcctggcaatcaagtatgttgccagctacgtcctggaacacccgt

SEQ ID NO: 3290 - DNA, 510 bp, Homo sapiens
  misc_feature 460: n = A,T,C or G
ctgatatttagacatgatgagctttgtgcaaaaggggagctggctacttctcgctctgcttcatcccactattattttggcacaacaggaagctgttgaaggaggatgttcccatcttggtcagtcctatgcggatagagatgtctggaagccagaaccatgccaaatatgtgtctgtgactcaggatccgttctctgcgatgacataatatgtgacgatcaagaattagactgccccaacccagaaattccatttggagaatgttgtgcagtttgcccacagcctccaactgctcctactcgccctcctaatggtcaaggacctcaaggccccaagggagatccaggccctcctggtattcctgggagaaatggtgaccctggtattccaggacaaccagggtcccctggttctcctggcccccctggaatctgtgaatcatgccctactggtcctcanaactattctccccagtatgattcatatgatgtcaagtctggagtagcagt

SEQ ID NO: 3291 - DNA, 169 bp, Homo sapiens
acactcaaactttatttggttgcctggatggggccagagaggaggacaagaagggtgtcaaagggtcagctcagtaggggtgattcagggtgtgctccatgatggtcagaagcgccagccaaggagacgtggctggcagcaggaagccatagcgcccagacctcggccg

SEQ ID NO: 3292 - DNA, 568 bp, Homo sapiens
  misc_feature 536: n = A,T,C or G
acaataacatttttaaaagaaaatggatcccactgttcctctttgccacagagaaagcacccagacgccacaggctctgtcgcatttcaaaacaaaccatgatggagtggcggccagtccagccttttaaagaacgtcaggtggagcagccaggtgaaaggcctggcggggaggaaagtgaaacgcctgaatcaaaagcagttttctaattttgactttaaatttttcatccgccggagacactgctcccatttgtggggggacattagcaacatcactcagaagcctgtgttcttcaagagcaggtgttctcagcctcacatgccctgccgtgctggactcaggactgaagtgctgtaaagcaaggagctgctgagaaggagcactccactgtgtgcctggagaatggctctcactactcaccttgtctttcagcttccagtgtcttgggttttttatactttgacagcttttttttaattgcatacatgagactgtgttgactttttttagttatgtgaaacactttgccgcangccgcctggcagaggcaggaaatgctccagca

SEQ ID NO: 3293 - DNA, 472 bp, Homo sapiens
accctcgctccagggtgctggctgagtagatccagtattcattccctgcaaagaacacagccttctcctcctgtggggcctcgtataccgcatcaatcttttccgggagctcaggccagaatgtggccaccagcaggggccccatgggcttgtcacgtggcgtcacagtccgccaaatgaaccggtccttgaagaagaagatctcaccacggatctgagcgatgccatcaaatacaatgccctgtttgcagatctcaggagtgacagggcccagcgtgggggtggggccggtgccaaggtcaatgtcaggagaggccccatagagctcctgaatgcccttgatgtcatcctgggacagacggaagttcttggtgtaggtgtaaatgggtgccatcagggccccagggtctttgggagtgctccagccccatggcgtggccaaactcgtgggctgccacgaggaacaggctgt

SEQ ID NO: 3294 - DNA, 184 bp, Homo sapiens
actcgcccaacaccacctggtaggtccaggagctcgagatgcagtggccggcagtcacaacccagtcgggggcgatgaggctaccgccacacgtgtggtagaagcttccacttttctcatactgcagggaaacctgccagggccagctgtaggggaccgcatcctcaccattgacaacgcggct

SEQ ID NO: 3295 - DNA, 381 bp, Homo sapiens
  misc_feature 301, 360: n = A,T,C or G
acccataggggaacatcagcagctgggaatagctgtggagggtaatgaaggccttgacttttccatgactcttgatgaagtccactatggatttcacttcaacttcagagttggcactgggtccgtggtatgaatcagagcaagggttgctgctggctccaggtcctccaaaacctgcatcccagttccggttaggatccacaccaacacagaggcttccagataccttggaccgggtcttccgccacatacgatttttggtttgagagaacacgtatccatcagggtttgtgactggcangaggaagatatccagggcatccagaatggaagtgatggatgggtcctttccataatcanaaacaatcttatttgctgtcc

SEQ ID NO: 3296 - DNA, 186 bp, Homo sapiens
  misc_feature 54, 61, 109, 170, 171, 173, 186: n = A,T,C or G
ccaagattatagtggagacaaatgttggaaaacagttcaacttctgtagtccanaaaccgncagggaggaagttctgctcaccctcacaccgtgttaggagactactgntatttgaccaatgaattgacttctaataaaatctagtggtgatgcaaaaaaaaaaaaaaannanaaaaaagcttgtn

SEQ ID NO: 3297 - DNA, 407 bp, Homo sapiens
ctcggtcccacacagcaggctccctctgtattggcgtggaccccaacaggaactgggacgctggctttgggttgtccggagccagcagtaacccctgctcggagacttaccacggcaagtttgccaattccgaagtggaggtcaagtccattgtagactttgtgaaggaccatgggaacatcaaggccttcatctccatccacagctactcccagctcctcatgtatccctatggctacaaaacagaaccagtccctgaccaggatgagctggatcagctttccaaggctgctgtgacagccctggcctctctctacgggaccaagttcaactatggcagcatcatcaaggcaatttatcaagccagtggagcactattgactggacctacagccagggcatcaagt

SEQ ID NO: 3298 - DNA, 487 bp, Homo sapiens
  misc_feature 469: n = A,T,C or G
acaaagccaagaatccacgtggcctcccacgctgaaccccaattttggggctcaccctgtgacacagccagaggcaaatggttccatgtccctcctattcctctttgcgcctggatgggatccggagggctctaggcttggctgctgtggccaccagatgaggctctatgaggtctgcaggggtcttgccagctccagatggacattccctgagatgctgttatgccacctggactggggccccctgtggcatccctggcatggacacataatgcccagcaaaggcatcatcaaagttccattactttagtgctggaaggcaaaccagatggcaacttgtttgcagagaaagaaactgagacccaaagaagggtcagccaaagccaggactcaagggtcaagggctggtgttgatacttcagctgctgagtggcaggagtccctttttgctgcccttctcccagagttncataataaggtgaggatg

SEQ ID NO: 3299 - DNA, 416 bp, Homo sapiens
acaaagccaagaatccacgtggcctcccacgctgaaccccaattttggggctcaccctgtgacacagccagaggcaaatggttccatgtccctcctattcctctttgcgcctggatgggatccggagggctctaggcttggctgctgtggccaccagatgaggctctatgaggtctgcaggggtcttgccagctccagatggacattccctgagatgctgttatgccacctggactggggccccctgtggcatccctggcatggacacataatgcccagcaaaggcatcatcaaagttccattactttagtgctggaaggcaaaccagatggcaacttgtttgcagagaaagaaactgagacccaaagaagggtcagccaaagccaggactcaagggtcaagggctggtgttgata

SEQ ID NO: 3300 - DNA, 207 bp, Homo sapiens; identical to SEQ ID NO: 2996

SEQ ID NO: 3301 - DNA, 239 bp, Homo sapiens
actgaagatcagcgatgcaaactcattagggaggagatggtctgaactgagttggagacatagtctagtttaatttttgacttcatagtaattgcaggaccagttctagacatccatttttcagcttcctctagtttttgaacttgcaaacaaaggagaacttcttctcacaagattcatccttccatttcttgaatcctgagcatgaagtcaggcttgcacagtagccagcattagca

SEQ ID NO: 3302 - DNA, 152 bp, Homo sapiens
cggacacaccatgataaggacgctgctgttgtccactttggtggctggagccctcagttgtggggaccccacttacccaccttatgtgactagggtggttggcggtgaagaagcgaggcccaacagctggccctggcaggtctccctgcagt

SEQ ID NO: 3303 - DNA, 521 bp, Homo sapiens
  misc_feature 209: n = A,T,C or G
actatctggtttgagagtgcccttgaaaatttcatactgcttagagtttcctttatttccgaacaaagaaactagtatgtgtcctgtaaccttttttccagacagtgtgacagataccttatacctccaacgtgcaaaattactggcatcaccagtgtctagataaaatttctggcccacatcatttgttttcccaggatatctatcancatagtgacccatctgtgggcagcctccacttggacaagggaaacacttgtttgcagtgaagacgttgtaagaggcacaggggaatccagcaaagccatcagggttgacgatgctatcagtgtaatatttgtagcttcttaagtgattacaggccgcaaagtctcgagtcccttcccagattccgtctatgtccacaatctgagagagaatgttctttttacatccaggcatttccactcctccatttggaaagaaatctaggtggcccacgacttggctcattccaaaccccaaattggggactatggggg

SEQ ID NO: 3304 - DNA, 448 bp, Homo sapiens
ccacgatgctgccactttggactctttcactgctgctgggagcagtagcaggaaaagaagtttgctacgaaagactcggctgcttcagtgatgactccccatggtcaggaattacggaaagacccctccatatattgccttggtctccaaaagatgtcaacacccgcttcctcctatatactaatgagaacccaaacaactttcaagaagttgccgcagattcatcaagcatcagtggctccaatttcaaaacaaatagaaaaactcgctttattattcatggattcatagacaagggagaagaaaactggctggccaatgtgtgcaagaatctgttcaaggtggaaagtgtgaactgtatctgtgtggactggaaaggtggctcccgaactggatacacacaagcctcgcagaacatcaggatcgtgggagcagaagtggcatattt

SEQ ID NO: 3305 - DNA, 207 bp, Homo sapiens; identical to SEQ ID NO: 2996

SEQ ID NO: 3306 - DNA, 542 bp, Homo sapiens
acttgatgccctggctgtaggtccagtcaatagtgcttccactggcttgataaattgccttgatgatgctgccatagttgaacttggtcccatagagagaggccagggctgtcacagcagccttggaaagctgatccagctcatcctggtcagggactggttctgttttgtagccatagggatacatgaggagctgggagtagctgtggatggagatgaaggccttgatgttcccatggtccttcacaaagtctacaatggacttgacctccacttcggaattggcaaacttgccgtggtaagtctccgagcaggggttactgctggctccggacaacccaaagccagcgtcccagttcctgttggggtccacgccaatacagagggagcctgctgtgtgggaccgagtcttgcgccacatgcgattcgtgctgtgcgtgaaggcaaagccatcagggttggtgacgatctccaggaagatgtccaagatgtcgagaatggcggtgaaagctgcatcctgcccgtagtcttgagtgatcttc

SEQ ID NO: 3307 - DNA, 249 bp, Homo sapiens
accagcaaggagactttggttactgtcctcgtgtgtacaggtgttccaggacgtagctggcaacatacttgattgccaggaaggtctcctcgcaggtagcccggatctgggattctggaaggagaaagccatatctgcctgtatctcgaagttcaaaggtgaaggaatatctgattccttggtcataagcccagtcgtcagagcccccagcagcaggatagattgttgtagctcccgggccatatgtgt

SEQ ID NO: 3308 - DNA, 86 bp, Homo sapiens
cggaactgccacgatgctgccactttggactctttcactgctgctgggagcagtagcaggaaaagaagtttgctacgaaagactcg

SEQ ID NO: 3309 - DNA, 331 bp, Homo sapiens
acctatggacgtgagatccaagtgacagagcttctcgacaagttagacttttatgtcctgcctgtgctcaatattgatggctacatctacacctggaccaagagccgattttggagaaagactcgctccacccatactggatctagctgcattggcacagaccccaacagaaattttgatgctggttggtgtgaaattggagcctctcgaaacccctgtgatgaaacttactgtggacctgccgcagaatctgaaaaggagaccaaggccctggctgatttcatccgcaacaaactctcttccatcaaggcatatctgacaatccactcgt

SEQ ID NO: 3310 - DNA, 445 bp, Homo sapiens
gaggaaatgacctttcatgggaacgtggacaaggacacacccgtgctgagtgagctcccagagccggtggtggctcgtttcatccgcatctacccactcacctggaatggcagcctgtgcatgcgcctggaggtgctggggtgctctgtggcccctgtctacagctactacgcacagaatgaggtggtggccaccgatgacctggatttccggcaccacagctacaaggacatgcgccagctcatgaaggtggtgaacgaggagtgccccaccatcacccgcacttacagcctgggcaagagctcacgaggcctcaagatctatgccatggagatctcagacaaccctggggagcatgaactgggggagcccgagttccgctacactgctgggatccatggcaacgaggtgctgggccgagagctgttgctgctgctcatgcagt

SEQ ID NO: 3311 - DNA, 594 bp, Homo sapiens
accaagcaatgaagaacaaattaaaaatctgctacaattggaggctcaagaacatctccagcttgatttttggaaatcacccaccaccccaggggagacagcccacgtccgagttcccttcgtcaacgtccaggcagtcaaagtgttcttggagtcccagggaattgcctattccattatgattgaagacgtgcaggtcctgttggacaaagagaatgaagaaatgctttttaataggagaagagaacggagtggtaacttcaattttggggcctaccataccctggaagagatttcccaagaaatggataacctcgtggctgagcaccctggtctagtgagcaaagtgaatattggctcttcttttgagaaccggcctatgaacgtgctcaagttcagcaccggaggagacaagccagctatctggctggatgctgggatccatgctcgagagtgggttacacaagctacggcactttggacagcaaataagattgtttctgattatggaaaggacccatccatcacttccattctggatgccctggatatcttcctcctgccagtcacaaaccctgatggatacgtgttctc

SEQ ID NO: 3312 - DNA, 555 bp, Homo sapiens
  misc_feature 471, 506: n = A,T,C or G
acattagcaccataacatgcgtctttagagccttcccaaatattagtaatcttgaccagcaatgacaagaaaaaagaggagcacctttacaagcagttgatatccaatattaaaataattgtggctttaaaaatatttctttaaattcttgcattacacttttctttttaaaccaatcttccaggagattaatcaatgaaatttataagttttatcaacgtataaaatttttttcatcttctgggactcatagaatacaatctgtgtttctgaccagttgaggtagttaaaatagggagggcttttctaatttcgtatttgactatttcagaaagaaaggttatcttttactggtgagcacagtcattgctctgcagatgggctaggattcaaagaatataacacagtgttgttatcataaagagtgttgaagtttatttattatagcaccattgagacattttgaaattnggaattggtaaaaaaataaaacaaaaagcatttgnattgtatttggtggaacagcaaaaaaagagaagtatcatttttctttgt

SEQ ID NO: 3313 - DNA, 194 bp, Homo sapiens
agggactcgagactttgcggcctgtaatcacttaagaagctacaaatattacactgatagcatcgtcaaccctgatggctttgctggattcccctgtgcctcttacaacgtcttcactgcaaacaagtgtttcccttgtccaagtggaggctgcccacagatgggtcactatgctgatagatatcctgggaaac

SEQ ID NO: 3314 - DNA, 256 bp, Homo sapiens
actcacccaacaccacctggtaggtcagatccctcgagatgcagtggccggcagtcacaacccaatcgggggcgatgaggctaccgccacacgtgtggtagaagcttccacttttctcatactgcggggaaacctgccagggccagctgtaggggaccgcatcctcaccatggacaacgcggctggaagagtgagaggaaggtgggccatagcctgaggcaacggccacaaggaggagggaactgagcagccggag

SEQ ID NO: 3315 - DNA, 331 bp, Homo sapiens; identical to SEQ ID NO: 3099

SEQ ID NO: 3316 - DNA, 378 bp, Homo sapiens
cagcaaataagattgtttctgattatggaaaggacccatccatcacttccattctggatgccctggatatcttcctcctgccagtcacaaaccctgatggatacgtgttctctcaaaccaaaaatcgtatgtggcggaagacccggtccaaggtatctggaagcctctgtgttggtgtggatcctaaccggaactgggatgcaggttttggaggacctggagccagcagcaacccttgctctgattcataccacggacccagtgccaactctgaagttgaagtgaaatccatagtggacttcatcaagagtcatggaaaagtcaaggccttcattaccctccacagctattcccagctgctgatgttcccctatgggt

SEQ ID NO: 3317 - DNA, 350 bp, Homo sapiens
  misc_feature 302: n = A,T,C or G
acctatggacgtgagatccaagtgacagagcttctcgacaagttagacttttatgtcctgcccgtgctcaatattgatggctacatctacacctggaccaagagccgattttggagaaagactcgctccacccatactggatctagctgcattggcacagaccccaacagaaattttgatgctggttggtgtgaaattggagcctctcgaaacccctgtgatgaaacttactgtggacctgccgcagagtatgaaaaggagaccaaggccctggctgatttcatccgcaacaaactctcttncatcaaggcatatctgacaatccactcgtacctcggccggaccacgct

SEQ ID NO: 3318 - DNA, 563 bp, Homo sapiens
  misc_feature 515: n = A,T,C or G
acactataccatagatataaggcaaggaatcccaattactgatttttttgaatggcctttatttggctatatcattgatagtctatggtgtggaatttttggacacctaccagaacacatattaccataagtttccattttatcaggttctaagaaactttatttttgaaagaaaaaaatggacaagaaagaaaaatgtttctaaaagtgttatctgtgtataaataaagtggctgataaattagtgaaaaggaagaagtttggaaagcagaagtttttatgttgtataaaaagaaatacagtgaattcacactacttaagactgataatagattattgttgtgggtaaatgagtcattttatctgttgcatacttacgtgaaggctttcaaaaggtcagtaataatttaaaggaatctacatcccttttataatcggcgaattggtgactaatgtttttatttttttctcctgttacatgccttttagacatttggttgccctaaccaaggttngggtagcaaaagagaaaggagacagaactctatcagtcattgtattta

SEQ ID NO: 3319 - DNA, 267 bp, Homo sapiens
actcattccaatgaatttgactcagatgtggatgttggggacttgcagatggttaaatttatttggtataacaatgtgatcaacccaactttacctagagtgggagcatccaagattatagtggagacaaatgttggaaaacagttcaacttctgtagtccagaaaccgtcagggaggaagttctgctcaccctcacaccgtgttaggagactactgttatttgaccaatgaattgacttctaataaaatctagtggtgatgcatta

SEQ ID NO: 3320 - DNA, 263 bp, Homo sapiens
acagttaaaaagttatacatagaaacttataatacagttctgtaaagctgaaagaactgtcaggaaaaagggagggtgttactttttttgattgatcattaaggaagttagaggaataaaaacacagtaaaaggtttaaaacattaaggaacatttttcaggtataaattttataaatacaaaacaaattcacaaattactctcaatactaaataaatatctagttaataaacttggacttaatacctgcagccagcactggt

SEQ ID NO: 3321 - DNA, 458 bp, Homo sapiens
accaagcaatgaagaacaaattaaaaatctgctacaattggaggctcaagaacatctccagcttgatttttggaaatcacccaccaccccaggggagacagcccacgtccgagttcccttcgtcaacgtccaggcagtcaaagtgttcttggagtcccagggaattgcctattccatcatgattgaagacgtgcaggtcctgttggacaaagagaatgaagaaatgctttttaataggagaagagaacggagtggtaacttcaattttggggcctaccataccctggaagagatttcccaagaaatggataacctcgtggctgagcaccctggtctagtgagcaaagtgaatattggctcttcttttgagaaccggcctatgaacgtgctcaagttcagcaccggaggagacaagccagctatctggctggatgctgggatccatgctcgagagtggg

SEQ ID NO: 3322 - DNA, 404 bp, Homo sapiens
acaaagtaatagaagttccatttaaatatgagttcaaaactgtatttactttttatgtggccctctctttaggggattctaattttacttagggtctctaagtgcagcataatgttcctgatgttaacagaagactgtatttttaaagttacaaatttgtatatggaattaagtaatggcgctatatacgctgttgtggggaggggggaagaaaaggaggaaccaattaaataggaccttttaaaaattgttaattttgtaaactttgcttctcttataagttattgtgattcattttagttactgtgttttattttgaaaatatttaaatattgcacttctataaatagtatgataaatgcacagacaattgcagtaaattcttttttaagctaggatatttg

SEQ ID NO: 3323 - DNA, 566 bp, Homo sapiens
ggccagtggggtctggtttgcaaagaagatcactcaagactacgggcaggatgcagctttcaccgccattctcgacaccttggacatcttcctggagatcgtcaccaaccctgatggctttgccttcacgcacagcacgaatcgcatgtggcgcaagactcggtcccacacagcaggctccctctgtattggcgtggaccccaacaggaactgggacgccggctttgggttgtccggagccagcagtaacccctgctcggagacttaccacggcaagtttgccaattccgaagtggaggtcaagttcattgtagactttgtgaaggaccatgggaacatcaaggccttcatctccatccacagctactcccagctcctcatgtatccctatggctacaaaacagaaccagtccctgaccaggatgagctggatcagctttccaaggctgctgtgacagccctggcctctctctacgggaccaagttcaactatggcagcatcatcaaggcaatttatcaagccagtggaagcactattgactggacctacagccagggcatcaagt

SEQ ID NO: 3324 - DNA, 253 bp, Homo sapiens
actcacccaacaccacctggtaggtcagatccctcgagatgcagtggccggcagtcacaacccaatcgggggcgatgaggctaccgccacacgtgtggtagaagcttccacttttctcatactgcagggaaacctgccagggccagctgtaggggaccgcatcctcaccatggacaacgcggctggaagagtgagaggaaggtgggccatagcctgaggcaacggccacaaggaggagggaactgagcagccg

SEQ ID NO: 3325 - DNA, 193 bp, Homo sapiens
acttggtcttgccccagcctgtggtggcacacagtgtccccgcggggaagtcgtcgtcggcgctgggcaggcacacggcggacactgtctgggagaagcgggcaggtgtggccagcttcagcagggtgatgtcattgttcacggtcagaatgctgaacttggggttcttgaagaccttggcgatcttcaggac

SEQ ID NO: 3326 - DNA, 384 bp, Homo sapiens
gaagggactcgagactttgcggcctgtaatcacttaagaagctacaaatattacactgatagcatcgtcaaccctgatggctttgctggattcccctgtgcctcttacaacgtcttcactgcaaacaagtgtttcccttgtccaagtggaggctgcccacagatgggtcactatgctgatagatatcctgggaaaacaaatgatgtgggccagaaattttatctagacactggtgatgccagtaattttgcacgttggaggtataaggtatctgtcacactgtctggaaaaaaggttacaggacacatactagtttctttgttcggaaataaaggaaactctaagcagtatgaaattttcaagggcactctcaaaccagatagt

SEQ ID NO: 3327 - DNA, 148 bp, Homo sapiens
actgcagggagacctgccagggccagctgttgggcctcgcttcttcaccgccaaccaccctagtcacataaggtgggtaagtggggtccccacaactgagggctccagccaccaaagtggacagcagcagcgtccttatcatggtgtg

SEQ ID NO: 3328 - DNA, 338 bp, Homo sapiens; identical to SEQ ID NO: 3064

SEQ ID NO: 3329 - DNA, 553 bp, Homo sapiens
acattagcaccataacatgcgtctttaaagccttcccaaatattagtaatcttgaccagcaatgacaagaaaaaagaggagcacctttacaagcagttgatatccaatattaaaataattgtggctttaaaaatatttctttaaattcttgcattacacttttctttttaaaccaatcttccaggagattaatcaatgaaatttataagttttatcaacgtataaaatttttttcatcttctgggactcatagaatacaatctgtgtttctgaccagttgaggtagttaaaatagggagggcttttctaatttcgtatttgactatttcagaaagaaaggttatcttttactggtgagcacagtcattgctctgcagatgggctaggattcaaagaatataacacagtgttgttatcataaagagtgttgaagtttatttattatagcaccattgagacattttgaaattggaattggtaaaaaaataaaacaaaaagcatttgaattgtatttggtggaacagcaaaaaaagagaagtatcatttttctttg

SEQ ID NO: 3330 - DNA, 322 bp, Homo sapiens
actcattccaatgaatttgactcagatgtggatgttggggacttgcagatggttaaatttatttggtataacaatgtgatcaacccaactttacctagagtgggagcatccaagattatagtggagacaaatgttggaaaacagttcaacttctgtagtccagaaaccgtcagggaggaagttctgctcaccctcacaccgtgttaggagactactgttatttgaccaatgaattgacttctaataaaatctagtggtgatgcattaaaaaaaaaaaaaaaaaccaaaaaaaaaaaaaaaaaaaaaaaaaaaaaaggcttgt

SEQ ID NO: 3331 - DNA, 565 bp, Homo sapiens
actatctggtttgagagtgcccttgaaaatttcatactgcttagagtttcctttatttccgaacaaagaaactagtatgtgtcctgtaaccttttttccagacagtgtgacagataccttatacctccaacgtgcaaaattactggcatcaccagtgtctagataaaatttctggcccacatcatttgttttcccaggatatctatcagcatagtgacccatctgtgggcagcctccacttggacaagggaaacacttgtttgcagtgaagacgttgtaagaggcacaggggaatccagcaaagccatcagggttgacgatgctatcagtgtaatatttgtagcttcttaagtgattacaggccgcaaagtctcgagtcccttcccagattccgtctatgtccacaatctgagagagaatgttctttttacatccaggcatttccactcctccatttggaaagaaatctaggtggcccacgacttggctcattccaaaccccaaattggggactatgggggcaccatccgtgtgaattacatccacaaatttggcatcgctgggg

SEQ ID NO: 3332 - DNA, 230 bp, Homo sapiens; identical to SEQ ID NO: 3096

SEQ ID NO: 3333 - DNA, 331 bp, Homo sapiens
acgagtggattgtcagatatgccttgatggaagagagtttgttgcggatgaaatcagccagggccatggtctccttttcagactctgcggcaggtccacagtaagtttcatcacaggggtttcgagaggctccaatttcacaccaaccagcatcaaaatttctgttggggtctgtgccaatgcagctagatccagtatgggtggagcgagtctttctccaaaatcggctcttggtccaggtgtagatgtagccatcaatattgagcacaggcaggacataaaagtctaacttgtcgagaagctctgtcacttggatctcacgtccataggt

SEQ ID NO: 3334 - DNA, 233 bp, Homo sapiens
  misc_feature 1, 3, 12, 34, 41, 143, 200, 219: n = A,T,C or G
ngnacgaacagnctctcttacaaaccactggcanaatgcangagaaatccactctctggcatggaaaccacagtccatgaaaatggcaggcttattttgtccagctttgccaaccttcaggaggtaaatagcgcgtccctcanatgtggttccgataacactgcgagagatgagggctggattctcagtggcgacttgtngagtccaagcctctatcgnttcccacttgttgt

SEQ ID NO: 3335 - DNA, 207 bp, Homo sapiens; identical to SEQ ID NO: 2996

SEQ ID NO: 3336 - DNA, 331 bp, Homo sapiens; identical to SEQ ID NO: 3009

SEQ ID NO: 3337 - DNA, 241 bp, Homo sapiens
  misc_feature 1, 207: n = A,T,C or G
nacctatggacgtgagatccaagtgacagagcttctcaacaagttagacttttatgtcctgcctgtgctcaatattgatggctacatctacacctggaccaagagccgattttggagaaagactcgctccacccatactggatctagctgcattggcacagaccccaacagaaattttgatgctggttggtgtgaaattggagcctntcgaaacccctgtgatggatcttactgtggacct

SEQ ID NO: 3338 - DNA, 121 bp, Homo sapiens
acagcctgttcctcgtggcagcccacgagtttggccacgccatggggctggagcactcccaagaccctggggccctgatggcacccatttacacctacaccaagaacttccgtctgtccca

SEQ ID NO: 3339 - DNA, 559 bp, Homo sapiens
cagaggaggaacgctttgtgttctcatcggagctgcatgggaagtctgcatacagcaaagtgacctgcatgcctcaccttatggaaaggatggtgggctctggcctcctgtggctggccttggtctcctgcattctgacccaggcatctgcagtgcagcgagacccatccactgtggaggacaagtgtgagaaggcctgccgccccgaggaggagtgccttgccctcaacagcacctggggctgtttctgcagacaggacctcaatagttctgatgtccacagtttgcagcctcagctagactgtgggcccagggagatcaaggtgaaggtggacaaatgtttgctgggaggcctgggtttgggggaggaggtcattgcctacctgcgagacccaaactgcagcagcatcttgcagacagaggagaggaactgggtatctgtgaccagccccgtccaggctagtgcctgcaggaacattctggagagaaatcaaacccatgccatctacaaaaacaccctctccttggtcaatgatttcatcatcagagacaccatcct

SEQ ID NO: 3340 - DNA, 222 bp, Homo sapiens
  misc_feature 41, 44, 96, 102, 117: n = A,T,C or G
acaagcttttttttttttttttttttttttttttttctaanagnaatgattcacttttattatgatcaatacgaaaagatctacctagtttaaaanacccanaagcttaaaagaaanattgggatctgcaaaacatccaggcaaaccaaaataagaattcaagaaagaaaagaaatgaaaaatgagaattttgaaacaaggccatcagctttctcaactagt

SEQ ID NO: 3341 - DNA, 576 bp, Homo sapiens
actatccctatgaggcataattataacaagctccatctgcctacgacaaacagacctaaaatcgctcattgcatactcttcaatcagccacatagccctcgtagtaacagccattctcatccaaaccccctgaagcttcaccggcgcagtcattctcataatcgcccacggacttacatcctcattactattctgcctagcaaactcaaactacgaacgcactcacagtcgcatcataatcctctctcaaggacttcaaactctactcccactaatagctttttgatgacttctagcaagcctcgctaacctcgccttaccccccactattaacctactgggagaactctctgtgctagtaaccacgttctcctgatcaaatatcactctcctacttacaggactcaacatactagtcacagccctatactccctctacatatttaccacaacacaatggggctcactcacccaccacattaacaacataaaaccctcattcacacgagaaaacaccctcatgttcatacacctatcccccattctcctcctatccctcaaccccgacatcattac

SEQ ID NO: 3342 - DNA, 413 bp, Homo sapiens
atacgccaacgccgccgacatcgactatatagcaggcaccaacaacatggacggccacatcttcgccagcatcgacatgcctgccatcaacaagggcaacaagaaagtcacggaggaggacttctacaagctggtcagtgagttcacaatcaccaaggggctcagaggcgccaagacgacctttgatgtctacactgagtcctgggcccaggacccatcccaggagaataagaagaagactgtggtggactttgagaccgatgtcctcttcctggtgcccaccgagattgccctagcccagcacagagccaatgccaagagtgccaagacctacgcctacctgttttcccatccctctcggatgcccgtctaccccaaatgggtgggggccgaccatgcagatgacattcagt

SEQ ID NO: 3343 - DNA, 418 bp, Homo sapiens
accgcccctccagccactggcacgaagtgcctcatctctggctggggcaacactctgagttctggtgccgactacccagacgagctgcagtgcctggatgctcctgtgctgagccaggctgagtgtgaagcctcctaccctggaaagattaccaacaacatgttctgtgtgggcttcctcgagggaggcaaggattcctgccagggtgattctggtggccctgtggtctccaatggagagctccaaggaattgtctcctggggctatggctgtgcccagaagaacaggcctggagtctacaccaaggtctacaactatgtggactggattaaggacaccatagctgccaacagctaaagcccctggtccctctgcagtctctataccaataaagtgaccctgctctcacaaaaaaaaa

SEQ ID NO: 3344 - DNA, 359 bp, Homo sapiens
acaaatgcttggacctccccttaatcaacagataaaatacataacttacatttaaggggagtggatacctcaaagtgcttaagtaaaaatttgttctctttaatagtttgaactgtcccttgttagtcgtgtctaaaacattgacctgaataatgagaaatcacaagctaatgttttacttattccttatatggtaagagactaccttttaaagcaccattttccatttggcatttcaccaaggtctaatgtccctggaattagtttttttgttttgccttttgaatatcgataggtgttcatctgaattaaactacgtttagtttgatggcttcctgcctccaaattggcaacagtgt

SEQ ID NO: 3345 - DNA, 213 bp, Homo sapiens
acaggtgttccaggacgtagctggcaacatacttgattgccaggaaggtctcctcgcaggtagcccggatctgggattctggaaggagaaagccatatctgcctgtatctcgaagttcaaaggtgaaggaatatctgattccttggtcataagcccagtcgtcagagcccccagcagcaggatagattgttgtagctcccgggccatatgtgt

SEQ ID NO: 3346 - DNA, 611 bp, Homo sapiens
ttcttctgcacatctacttgcttaaattgtgggcaaaagagaaaaagaaggattgatcagagcattgtgcaatacagtttcattaactccttccctcgctcccccaaaaatttgaatttttttttcaacactcttacacctgttatggaaaatgtcaacctttgtaagaaaaccaaaataaaaattgaaaaataaaaaccataaacatttgcaccacttgtggcttttgaatatcttccacagagggaagtttaaaacccaaacttccaaaggtttaaactacctcaaaacactttcccatgagtgtgatccacattgttaggtgctgacctagacagagatgaactgaggtccttgttttgttttgttcataatacaaaggtgctaattaatagtatttcagatacttgaagaatgttgatggtgctagaagaatttgagaagaaatactcctgtattgagttgtatcgtgtggtgtattttttaaaaaatttgatttagcattcatattttccatcttattcccaattaaaagtatgcagattattttgcccaaagttgtcctcttcttcagattcaacatttgttctttgccagtctcattttcatct

SEQ ID NO: 3347 - DNA, 508 bp, Homo sapiens
actatctggtttgagagtgcccttgaaaatttcatactgcttagagtttcctttatttccgaacaaagaaactagtatgtgtcctgtaaccttttttccagacagtgtgacagataccttatacctccaacgtgcaaaattactggcatcaccagtgtctagataaaatttctggcccacatcatttgttttcccaggatatctatcagcatagtgacccatctgtgggcagcctccacttggacaagggaaacacttgtttgcagtgaagacgttgtaagaggcacaggggaatccagcaaagccatcagggttgacgatgctatcagtgtaatatttgtagcttcttaagtgattacaggccgcaaagtctcgagtcccttcccagattccgtctatgtccacaatctgagagagaatgttctttttacatccaggcatttccactcctccatttggaaagaaatctaggtggcccacgacttggctcattccaaaccccaaattg

SEQ ID NO: 3348 - DNA, 592 bp, Homo sapiens
actatctggtttgagagtgcccttgaaaatttcatactgcttagagtttcctttatttccgaacaaagaaactagtatgtgtcctgtaaccttttttccagacagtgtgacagataccttatacctccaacgtgcaaaattactggcatcaccagtgtctagataaaatttctggcccacatcatttgttttcccaggatatctatcagcatagtgacccatctgtgggcagcctccacttggacaagggaaacacttgtttgcagtgaagacgttgtaagaggcacaggggaatccagcaaagccatcagggttgacgatgctatcagtgtaatatttgtagcttcttaagtgattacaggccgcaaagtctcgagtcccttcccagattccgtctatgtccacaatctgagagagaatgttctttttacatccaggcatttccactcctccatttggaaagaaatctaggtggcccacgacttggctcattccaaaccccaaattggggactatgggggcaccatccgtgtgaattacatccacaaatttggcatcgctggggtccaatcggactaattcaggtgtgccc

SEQ ID NO: 3349 - DNA, 507 bp, Homo sapiens
actgattttttttccccccaacaaaggaacactacatcaacactgttggcggggacctggacacagaagactcctgtttcaagaaaatacaatcatctctcaaaggctgtaatttatatgcattttaaaactctaggtattgaaaaccacccaagtgtcccaaatagaagggtaatatataatcaatcactcagtgtaatattatacatcctttaaaaatgttattgggaaatgttttatgatctgtaagtccaaggaatcctctcccaccatttctttccccccgctgttcccccatacccacacttctttgttccaattggcatgtaaatttggttttcccgccaaatgagtcagtcatgatgggaacctcaactgatttgaacagatgtgtgtcaatgttacttggaaaactagatgtcaataaccagggtcacagaaaaaggcagtggtcacaactctgtaaaaatgtatgcatgcacacagacaagaactaaagtggaaccc

SEQ ID NO: 3350 - DNA, 331 bp, Homo sapiens; identical to SEQ ID NO: 3099

SEQ ID NO: 3351 - DNA, 539 bp, Homo sapiens
  misc_feature 466, 469: n = A,T,C or G
actgaagatcagcgatgcaaactcattagggaggagatggtctgaactgagttggagacatagtctagtttaatttttgacttcatagtaattgcaggaccagttctagacatccatttttcagcttcctctagtttttgaacttgcaaacaaaggagaacttcttctcacaagattcatccttccatttcttgaatcctgagcatgaagtcaggcttgcacagtagccagcattagcactgctcggggatccagtgtcccaggacttgtaggagaccagggacccactactccagtgccagcggcggttcttttttgggtcatggaggccaatccagacattgctgtcatcagtgctactctccttaatcagtgaggccacgaaggcaccctccgcctgggtgagcacagacaccaggttgcctgaattcatgttctggcaatagagatctgcatcaacccaagnctnagggtcttcattaaagtagtagcagtaggagcgataggcattggtgccttctgggcagctgattcgggga

SEQ ID NO: 3352 - DNA, 151 bp, Homo sapiens
cccaaaatggggcactatgctgaccaatttaaggggaaaacaagtgctgtggaacaaacctttttcctgaacacaggagagagtggtaactttactagttggagatataaggtatcagtcacactttctggaaaagagaaagtgaatgggt

SEQ ID NO: 3353 - DNA, 502 bp, Homo sapiens
  misc_feature 487: n = A,T,C or G
cttgctttcagggcacatctgaattagtccgattggaccccagcgatgccaaatttgtggatgtaattcacacggatggtgcccccatagtccccaatttggggtttggaatgagccaagtcgtgggccacctagatttctttccaaatggaggagtggaaatgcctggatgtaaaaagaacattctctctcagattgtggacatagacggaatctgggaagggactcgagactttgcggcctgtaatcacttaagaagctacaaatattacactgatagcatcgtcaaccctgatggctttgctggattcccctgtgcctcttacaacgtcttcactgcaaacaagtgtttcccttgtccaagtggaggctgcccacagatgggtcactatgctgatagatatcctgggaaaacaaatgatgtgggccagaaattttatctagacactggtgatgccagtaattttgcacgttggaggtataaggnatctgtcacactgtc

SEQ ID NO: 3354 - DNA, 436 bp, Homo sapiens
  misc_feature 348, 380: n = A,T,C or G
actgaagatcagcgatgcaaactcattagggaggagatggtctgaactgagttggagacatagtctagtttaatttttgacttcatagtaattgcaggaccagttctagacatccatttttcagcttcctctagtttttgaacttgcaaacaaaggagaacttcttctcacaagattcatccttccatttcttgaatcctgagcatgaagtcaggcttgcacagtagccagcattagcactgctcggggatccagtgtcccaggacttgtaggagaccagggacccactactccagtgccagcggcggttcttttttgggtcatggaggccaatccagacattgctgncatcagtgctactctccttatcagtgaggccncgaaggcaccctccgcctgggtgagcacagacaccaggttgcctgaattcatgttc

SEQ ID NO: 3355 - DNA, 366 bp, Homo sapiens
actatctggtttgagagtgcccttgaaaatttcatactgcttagagtttcctttatttccgaacaaagaaactagtatgtgtcctgtaaccttttttccagacagtgtgacagataccttatacctccaacgtgcaaaattactggcatcaccagtgtctagataaaatttctggcccacatcatttgttttcccaggatatctatcagcatagtgacccatctgtgggcagcctccacttggacaagggaaacacttgtttgcagtgaagacgttgtaagaggcacaggggaatccagcaaagccatcagggttgacgatgctatcagtgtaatatttgtagcttcttaagtgattacaggccgc

SEQ ID NO: 3356 - DNA, 230 bp, Homo sapiens; identical to SEQ ID NO: 3181

SEQ ID NO: 3357 - DNA, 339 bp, Homo sapiens
accctttagctattgcccctctttatacttccgtctctctctccaacagctcctggcaaccactaatctactttctgtctctatatttgcctattctagacatttcaccactgtgatcatggaatacgtggtattttgagactggcttttttcactaagcataatgtttgcaaggttcatccatgtcatagcatgtattatcagcacttcattccctttcaaggctgagcaatgttccattgtatggatataaggtatcttttttttacctatttatcagtggatgggcatttgatattcatctcttaccattataagcgttcatatacaagttttggt

SEQ ID NO: 3358 - DNA, 254 bp, Homo sapiens
ccggctgctcagttccctcctccttgtggccgttgcctcaggctatggcccaccttcctctcactcttccagccgcgttgtccatggtgaggatgcggtcccctacagctggccctggcaggtttccctgcagtatgagaaaagtggaagcttctaccacacgtgtggcggtagcctcatcgcccccgattgggttgtgactgccggccactgcatctcgagggatctgacctaccaggtggtgttgggtgagt

SEQ ID NO: 3359 - DNA, 196 bp, Homo sapiens
gccaaaccagccctcggctgctatgagttggcaagatggccgagtctacttcttcaagggcaaagtctactggcgcctcaaccagcagcttcgagtagagaaaggctatcccagaaatatttcccacaactggatgcactgtcgtccccggactatagacactaccccatcaggtgggaataccactccctcaggt

SEQ ID NO: 3360 - DNA, 179 bp, Homo sapiens
acactcaaactttatttggttgcctggatggggccagagaggaggacaagaagggtgtcaaagggtcagctcagtaggggtgattcagggtgtgctccatgatggtcagaagcgccagccacgtctccttggctgtggggatgatctgggaggctggcagcaggaagccatagcgccca

SEQ ID NO: 3361 - DNA, 517 bp, Homo sapiens
actctggagactcacgtgcatattaagaaacatttccgtgccatttaattaagggggcaggggagaagaaaaagaaaagaaaaagcaagacttacccaagatatcagatggcactatacacatgaattgaaagtgcatttacattacttcaaaagctcattttaggcactgctgaataaccaatgaaaataggtagtttcaagtttttccctttagattttaaccccaccccatcatcatttcagaaacatacacacggctgggcgcagtagctcatgcctgtaatcccagcactttgggaggccgaggtgggtggatcacctaaggtcaggagttcaagaccagcctggccaacatggtgaaaccccatctctactaaaataccaaaacttagctgggcatggtggtgggtgcctgtaatcccagctacttgggaggctgaggcaggagaatcgcttgaacccaggaggcgggggttgcagtgagctgagatcgcaccattgcactccagcctggg

SEQ ID NO: 3362 - DNA, 554 bp, Homo sapiens
actgaagatcagcgatgcaaactcattagggaggagatggtctgaactgagttggagacatagtctagtttaatttttgacttcatagtaattgcaggaccagttctagacatccatttttcagcttcctctagtttttgaacttgcaaacaaaggagaacttcttctcacaagattcatccttccatttcttgaatcctgagcatgaagtcaggcttgcacagtagccagcattagcactgctcggggatccagtgtcccaggacttgtaggagaccagggacccactactccagtgccagcggcggttcttttttgggtcatggaggccaatccagacattgctgtcatcagtgctactctccttaatcagtgaggccacgaaggcaccctccgcctgggtgagcacagacaccaggttgcctgaattcatgttctggcaatagagatctgcatcaacccaggtctcagggtcttcattaaagtagtagcagtaggagcgataggcattggtgccttctgggcagctgattcggggattaggcagctctgtc

SEQ ID NO: 3363 - DNA, 151 bp, Homo sapiens
ggacacaccatgataaggacgctgctgctgtccactttggtggctggagccctcagttgtggggaccccacttacccaccttatgtgactagggtggttggcggtgaagaagcgaggcccaacagctggccctggcaggtctccctgcagt

SEQ ID NO: 3364 - DNA, 455 bp, Homo sapiens
acaagtagttctgtatttgaaagtgcctttgcagctcagaaccacagcaacgatcacaaatgactttattatttatttttttaattgtatttttgttgttgggggaggggagactttgatgtcagcagttgctggtaaaatgaagaatttaaagaaaaaaatgtcaaaagtagaactttgtatagttatgtaaataattcttttttattaatcactgtgtatatttgatttattaacttaataatcaagagccttaaaacatcattcctttttatttatatgtatgtgtttagaattgaaggtttttgatagcattgtaagcgtatggctttatttttttgaactcttctcattacttgttgcctataagccaaaattaaggtgtttgaaaatagtttattttaaaacaataggatgggcttctgtgcccagaatactgatggaattttttttgt

SEQ ID NO: 3365 - DNA, 331 bp, Homo sapiens; identical to SEQ ID NO: 3009

SEQ ID NO: 3366 - DNA, 120 bp, Homo sapiens; identical to SEQ ID NO: 3033

SEQ ID NO: 3367 - DNA, 317 bp, Homo sapiens
ctgagtgtgaagcctcctaccctggaaagattaccaacaacatgttctgtgtgggcttcctcgagggaggcaaggattcctgccagggtgattctggtggccctgtggtctccaatggagagctccaaggaattgtctcctggggctatggctgtgcccagaagaacaggcctggagtctacaccaaggtctacaactatgtggactggattaaggacaccatagctgccaacagctaaagcccctggtccctctgcagtctctataccaataaagtgaccctgctctcacaaaaaaaaaaaaaaaaaaaaaaaaaa

SEQ ID NO: 3368 - DNA, 230 bp, Homo sapiens; identical to SEQ ID NO: 3181

SEQ ID NO: 3369 - DNA, 157 bp, Homo sapiens
actcacccaacaccacctggtaggtcagatccctcgagatgcagtggccggcagtcacaacccaatcgggggcgatgaggctaccgccacacgtgtggtagaagcttccacttttctcatactgcagggaaacctgccagggccagctgtaggggac

SEQ ID NO: 3370 - DNA, 443 bp, Homo sapiens
actgtattttccgcaaaagaaaattaacatttagtaacacactaatgaattttatctccaaagagattagtgcactggcaaagtattcggattacagtggagagctgtgaacagcagataccgaaaacaccccagcctggcagatcccaaggtaacgatggccttcactgaccactccctttgccagaggtccagaaagaacttgcagcatgatcacctgcctgctgcacttccaactctaagcagcaaacttcaaggagccaaagaggagtccccagtgggcaaggggagcagagaagagaaacgtggtaaatgtaaacctaaaagacagtaaaatgggatacaatccccattcaaatcccagagatgtgggcaagtccccaaaagtagttgttagattaaaaaactgggcacacctcacttccccaaaaaatataatacat

SEQ ID NO: 3371 - DNA, 562 bp, Homo sapiens
  misc_feature 438, 495, 523: n = A,T,C or G
cgctttattattcatggattcatagacaagggagaagaaaactggctggccaatgtgtgcaagaatctgttcaaggtggaaagtgtgaactgtatctgtgtggactggaaaggtggctcccgaactggatacacacaagcctcgcagaacatcaggatcgtgggagcagaagtggcatattttgttgaatttcttcagtcggcgttcggttactcaccttccaacgtgcatgtcattggccacagcctgggtgcccacgctgctggggaggctggaaggagaaccaatgggaccattggacgcatcacagggttggacccagcagaaccttgctttcagggcacacctgaattagtccgattggaccccagcgatgccaaatttgtggatgtaattcacacggatggtgcccccatagtccccaatttggggtttggnatgagccaagtcgtgggccacctagatttctttccaaatggaggagtggaaatgccntggatgtaaaaagaacattctctctcanattgtggacatagacggaatctgggaagggactcgagac

SEQ ID NO: 3372 - DNA, 568 bp, Homo sapiens
actatctggtttgagagtgcccttgaaaatttcatactgcttagagtttcctttatttccgaacaaagaaactagtatgtgtcctgtaaccttttttccagacagtgtgacagataccttatacctccaacgtgcaaaattactggcatcaccagtgtctagataaaatttctggcccacatcatttgttttcccaggatatctatcagcatagtgacccatctgtgggcagcctccacttggacaagggaaacacttgtttgcagtgaagacgttgtaagaggcacaggggaatccagcaaagccatcagggttgacgatgctatcagtgtaatatttgtagcttcttaagtgattacaggccgcaaagtctcgagtcccttcccagattccgtctatgtccacaatctgagagagaatgttctttttacatccaggcatttccactcctccatttggaaagaaatctaggtggcccacgacttggctcattccaaaccccaaattggggactatgggggcaccatccgtgtgaattacatccacaaatttggcatcgctggggtcc

SEQ ID NO: 3373 - DNA, 567 bp, Homo sapiens
gttactcaccttccaacgtgcatgtcattggccacagcctgggtgcccacgctgctggggaggctggaaggagaaccaatgggaccattggacgcatcacagggttggacccagcagaaccttgctttcagggcacacctgaattagtccgattggaccccagcgatgccaaatttgtggatgtaattcacacggatggtgcccccatagtccccaatttggggtttggaatgagccaagtcgtgggccacctagatttctttccaaatggaggagtggaaatgcctggatgtaaaaagaacattctctctcagattgtggacatagacggaatctgggaagggactcgagactttgcggcctgtaatcacttaagaagctacaaatattacactgatagcatcgtcaaccctgatggctttgctggattcccctgtgcctcttacaacgtcttcactgcaaacaagtgtttcccttgtccaagtggaggctgcccacagatgggtcactatgctgatagatatcctgggaaaacaaatgatgtgggccagaaattttatctagaca

SEQ ID NO: 3374 - DNA, 349 bp, Homo sapiens
  misc_feature 63, 81, 146, 227, 323, 336, 338: n = A,T,C or G
acaagctttttttttttttttttttttttttttgaggtttgcaggaggcctttaattgtgaanagcgcaatcagaaaacanatatgctggtcaaggaggtggccagcccgggagatgccctggagcaggggagagatgcccctgcncctagtggcctacagcattctgggctaggtgtgggagtgggtgggcagtctcactgcttggagcgtccagcgtcatggcanatgccaaagttggtgttggtgatggagcccacgatggtcttgtctccctcacaggtcaggccacgctcacagggacacttgtagtaaatcccatanagcgtcttgacanancactcgctgtt

SEQ ID NO: 3375 - DNA, 269 bp, Homo sapiens
gaaactccttgtgctagctgtgctgctcacagtggccgccgccgacagcggcatcagccctcgggccgtgtggcagttccgcaaaatgatcaagtgcgtgatcccggggagtgaccccttcttggaatacaacaactacggctgctactgtggcttggggggctcaggcacccccgtggatgaactggacaagtgctgccagacacatgacaactgctatgatcaggccaagaagctggacagctgtaaatttctgctggacaacccgt

SEQ ID NO: 3376 - DNA, 329 bp, Homo sapiens
acctatggacgtgagatccaagtgacagagcttctcgacaagttagacttttatgtcctgcctgtgctcaatattgatggctacatctacacctggaccaagagccgattttggagaaagactcgctccacccatactggatctagctgcattggcacagaccccaacagaaattttgatgctggttggtgtgaaattggagcctctcgaaacccctgtgatgaaacttactgtggacctgccgcagagtctgaaaaggagaccaggccctggctgatttcatccgcaacaaactctcttccatcaaggcatatctgacaatccactcg

SEQ ID NO: 3377 - DNA, 180 bp, Homo sapiens
acccttagcagcagacacaacatttagagccaggagaggggtgggtttcatgccaagcagactggagacacaaggggcggtcggaagagggttggggaggctggagggtgcgtcggaggtccccgctgtggcgagcgagggggtggtggtggaggaggaagaagaagaaccggtggaggg

SEQ ID NO: 3378 - DNA, 572 bp, Homo sapiens
  misc_feature 367, 528: n = A,T,C or G
accacatcacataagaaaaaaggttctaatgttttcttaacttaacagcaaaccagtccagctacgggggcccagccagccagcagctgagtgggggttacggaggcggctacggtggccagagcagcatgagtggatacgaccaagttttacaggaaaactccagtgattttcaatcaaacattgcataggtaaccaaggagcagtgaacagcagctactacagtagtggaagccgtgcatctatgggcgtgaacggaatgggagggttgtctagcatgtccagtatgagtggtggatggggaatgtaattgatcgatcctgatcactgactcttggtcaaccttttttttttttttttctttaanaaaacttcagtttaacagtttctgcaatacaagcttgtgatttatgcttactctaagtggaaatcaggattgttatgaagacttaaggcccagtatttttgaatacaatactcatctaggatgtaacagtgaagctgagtaaactataactgttaaacttnaagttccagcttttctcaagttagttataggatgtaccttggcc

SEQ ID NO: 3379 - DNA, 268 bp, Homo sapiens
acagaccacagcaccacgtctgctacggtgagttcattcccagcgagccaagggctcttcccaagagcagagttcatggagcggaaaacagcggctttttctttactgcttccctcttttaactgaaaaatcgcaatatctacccagctatctataagggttgcgttgacagcattatgcttctggccaaacagagagaacaagaaacgtgcaatgttcccttcgccttcgatggggcacatcgtctggatgctgaatttcatctgcg

SEQ ID NO: 3380 - DNA, 331 bp, Homo sapiens; identical to SEQ ID NO: 3037

SEQ ID NO: 3381 - DNA, 207 bp, Homo sapiens
acactcaaactttatttggttgcctggatggggccagagaggaggacaagaagggtgtcaaagggtcagctcagtaggggtgattcagggtgtgctccatgatggtcagaagcgccagccacgtctccttggctgtggggatgatctgggaggctggcagcaggaagccacagcgcccagtgtcccggagctcgaaggtgaaggagt

SEQ ID NO: 3382 - DNA, 528 bp, Homo sapiens
  misc_feature 495, 522: n = A,T,C or G
acacggaataccaagaggtccaggcgagaagcaggggtggcaggcaataagcaggatgtgggagcactacacaaaccctacgtggggagaggggtctcccagaagaggctggtcctgcctggctacagcgttacccacgagagaatccttgctgcttgctggcagcaagccatactggggggcctgggccttcagtataaaaaatatctcaacctaggggagggccttgttgactgtttgaacatggaaacccttggtccaacatgatttcccgtggtccactgaggaggtttaggccacaatggggtaggtgcttagagaggattcaagcccagtgaacccttggcctcccagctctgaggagggccacagagccagtattccctacccccacccacagaaatgtatagcagtctctgactgttgctttcacacaccatcacggttgctgttctgtaggtgctgctcagggaaggtgggaaggacagcaggctntttcttgacctcaaataggatacactncaaaga

SEQ ID NO: 3383 - DNA, 576 bp, Homo sapiens
  misc_feature 381, 382, 527, 572: n = A,T,C or G
actgggtatctgtgaccagccccgtccaggctagtgcctgcaggaacattctggagagaaatcaaacccatgccatctacaaaaacaccctctccttggtcaatgatttcatcatcagagacaccatcctcaacatcaacttccaatgtgcctacccactggacatgaaagtcagcctccaagctgccttgcagcccattgtaagttccctgaacgtcagtgtggacgggaatggagagttcattgtcaggatggccctcttccaagaccagaactacacgaatccttacgaaggggatgcagttgaactgtctgttgagtccgtgctgtatgtgggtgccatcttggaacaaggggacacctcccggtttaacctggtgnngaggaactgctatgccacccccactgaagacaaggctgaccttgtgaagtatttcatcatcagaaacagctgctcaaatcaacgtgattccaccatccacgtggaggagaatgggcagtcctcggaaagccggttctcagttcanatgttcatgtttgctggacattatgacctagttttcctgcattgngaga

SEQ ID NO: 3384 - DNA, 331 bp, Homo sapiens
acgagtggattgtcagatatgccttgatggaagagagtttgttgcggatgaaatcagccagggccttggtctccttttcagactctgcggcaggtccacagtaagcttcatcacaggggtttcgagaggctccaatttcacaccaaccagcatcaaaatttctgttggggtctgtgccaatgcagctagatccagtatgggtggagcgagtctttctccaaaatcggctcttggtccaggtgtagatgtagccatcaatattgagcacaggcaggacataaaagtctaacttgttgagaagctctgtcacttggatctcacgtccataggt

SEQ ID NO: 3385 - DNA, 230 bp, Homo sapiens
acaacaagtgggaaacgatagaggcttggactcaacaagtcgccactgagaatccagccctcatctctcgcagtgttatcggaaccacatttgagggacgcgttatttacctcctgaaggttggcaaagctggacaaaataagcctgccattttcatggactgtggtttccatgccagagagtggatttcttctgcattctgccagtggtttgtaagagaggctgttcgt

SEQ ID NO: 3386 - DNA, 550 bp, Homo sapiens
  misc_feature 257, 258, 421, 438: n = A,T,C or G
actatctggtttgagagtgcccttgaaaatttcatactgcttagagtttcctttatttccgaacaaagaaactagtatgtgtcctgtaaccttttttccagacagtgtgacagataccttatacctccaacgtgcaaaattactggcatcaccagtgtctagataaaatttctggcccacatcatttgttttcccaggatatctatcagcatagtgacccatctgtgggcagcctccacttggacaagggaaacacnntgtttgcagtgaagacgttgtaagaggcacaggggaatccagcaaagccatcagggttgacgatgctatcagtgtaatatttgtagcttcttaagtgattacaggccgcaaagtctcgagtcccttcccagattccgtctatgtccacaatctgagagagaangttctttttacatccangcatttccactcctccatttggaaagaaatctaggtggcccacgacttggctcattccaaaccccaaattggggactatgggggcaccatccgtgtgaatacatccacaaat

SEQ ID NO: 3387 - DNA, 528 bp, Homo sapiens
ctggaaaggtggctcccgaactggatacacacaagcctcgcagaacatcaggatcgtgggagcagaagtggcatattttgttgaatttcttcagtcggcgttcggttactcaccttccaacgtgcatgtcattggccacagcctgggtgcccacgctgctggggaggctggaaggagaaccaatgggaccattgggcgcatcacagggttggacccagcagaaccttgctttcagggcacacctgaattagtccgattggaccccagcgatgccaaatttgtggatgtaattcacacggatggtgcccccatagtccccaatttggggtttggaatgagccaagtcgtgggccacctagatttctttccaaatggaggagtggaaatgcctggatgtaaaaagaacattctctctcagattgtggacatagacggaatctgggaagggactcgagactttgcggcctgtaatcacttaagaagctacaaatattacactgatagcatcgtcaaccctgatggctttgc

SEQ ID NO: 3388 - DNA, 368 bp, Homo sapiens
  misc_feature 288: n = A,T,C or G
acatagcgtaaaaactctgcagagaagtattcccaataaggaaatagcattgaaatgttaaatacaatttctgaaagttatgttttttttctatcatctggtataccattgctttatttttataaattattttctcattgccattggaatagatatctcagattgtgtagatatgctatttaaataatttatcaggaaatactgcctgtagagttagtatttctatttttatataatgtttgcacactgaattgaagaattgttggttttttctcttttttgttttgntttttttttttttttttgcttttgacctcccatttttactatttgccaatacctttttctaggaatgtgcttttttttgt

SEQ ID NO: 3389 - DNA, 547 bp, Homo sapiens
acttcaagaaaacattcacatttctgctacaagaaaaggttctgatgatttaaatgtttaagacttatggcagctcttcagaaagaaaaaggaagtcttcataagatacagagatagggaggctgaggcgggtggattgtgaggtcaggagtttaagaccagcctggccaagatggtgaaaccccgtctctactgaaaatacaaaaattagcctggcatggtgacgggcacctgtaatcccagctactcaggctgaggcagagaattgcttgaacccaggtggcggatgttgcaataagccgaaatcgtgcaactacactccagcctgggcaacagagcgagactcaaacagacaaacaaaaagtaactaggaaagtgttttacatgtgggcttattttaagaagaaatttactaaaagctgagagatgggtctcgataaaatttgatgattcaaagaaagtggatgggaactttactgatcttagtttaaaatatcctgagtcacctgccttatgaggtggaaggtctttctttcttactatatgt

SEQ ID NO: 3390 - DNA, 230 bp, Homo sapiens; identical to SEQ ID NO: 3096

SEQ ID NO: 3391 - DNA, 533 bp, Homo sapiens
actatctggtttgagagtgcccttgaaaatttcatactgcttagagtttcctttatttccgaacaaagaaactagtatgtgtcctgtaaccttttttccagacagtgtgacagataccttatacctccaacgtgcaaaattactggcatcaccagtgtctagataaaatttctggcccacatcatttgttttcccaggatatctatcagcatagtgacccatctgtgggcagcctccacttggacaagggaaacacttgtttgcagtgaagacgttgtaagaggcacaggggaatccagcaaagccatcagggttgacgatgctatcagtgtaatatttgtagcttcttaagtgattacaggccgcaaagtctcgagtcccttcccagattccgtctatgtccacaatctgagagagaatgttctttttacatccaggcatttccactcctccatttggaaagaaatctaggtggcccacgacttggctcattccaaaccccaaattggggactatgggggcaccatccgtgt

SEQ ID NO: 3392 - DNA, 190 bp, Homo sapiens
acagaagaaagcgggtgtcaatgtcctcgggggaccagggaagtaattttacaggtcgctgaagggttcctgcccatggtttttcatcagaaaagcagccaagttgtccgtagcagacctcttttcctctgactgtggccagcaggagaaggccgagggtccaagggggcagcatcatgctgcaccagag

SEQ ID NO: 3393 - DNA, 569 bp, Homo sapiens
  misc_feature 533: n = A,T,C or G
tgccacgatgctgccactttggactctttcactgctgctgggagcagtagcaggaaaagaagtttgctacgaaagactcggctgcttcagtgatgactccccatggtcaggaattacggaaagacccctccatatattgccttggtctccaaaagatgtcaacacccgcttcctcctatatactaatgagaacccaaacaactttcaagaagttgccgcagattcatcaagcatcagtggctccaatttcaaaacaaatagaaaaactcgctttattattcatggattcatagacaagggagaagaaaactggctggccaatgtgtgcaagaatctgttcaaggtggaaagtgtgaactgtatctgtgtggactggaaaggtggctcccgaactggatacacacaagcctcgcagaacatcaggatcgtgggagcagaagtggcatattttgttgaatttcttcagtcggcgttcggttactcaccttccaacgtgcatgtcattggccacagcctgggtgcccacgctgctngggaggctggaaggagaaccaatgggaccattggac

SEQ ID NO: 3394 - DNA, 479 bp, Homo sapiens
atcaagcatcagtggctccaatttcaaaacaaatagaaaaactcgctttattattcatggattcatagacaagggagaagaaaactggctggccaatgtgtgcaagaatctgttcaaggtggaaagtgtgaactgtatctgtgtggactggaaaggtggctcccgaactggatacacacaagcctcgcagaacatcaggatcgtgggagcagaagtggcatattttgttgaatttcttcagtcggcgttcggttactcaccttccaacgtgcatgtcattggccacagcctgggtgcccacgctgctggggaggctggaaggagaaccaatgggaccattggacgcatcacagggttggacccagcagaaccttgctttcagggcacacctgaattagtccgattggaccccagcgatgccaaatttgtggatgtaattcacacggatggtgcccccatagtccccaatttggggtttg

SEQ ID NO: 3395 - DNA, 244 bp, Homo sapiens
  misc_feature 154, 159, 171, 203, 224: n = A,T,C or G
gtacaagcttttttttttttttttttttttttttttttattttctgagagatctttattctttattcaggatgtgggatcgatcagcactgccagctgggccttggttctagtggcttgctatggtctcctcaatccagtcgatgaaggcgganactcnagtgaacaccgngggcttccaaatgaagttgcagccaaagccanaaacaaagctggtcacaccgnggacctgccagccaccatcc

SEQ ID NO: 3396 - DNA, 319 bp, Homo sapiens
ggcactggagtagtgggtccctggtctcctacaagtcctgggacactggatccccgagcagtgctaatgctggctactgtgcaagcctgacttcatgctcaggattcaagaaatggaaggatgaatcttgtgagaagaagttctcctttgtttgcaagttcaaaaactagaggaagctgaaaaatggatgtctagaactggtcctgcaattactatgaagtcaaaaattaaactagactatgtctccaactcagttcagaccatctcctccctaatgagtttgcatcgctgatcttcagtacctcggccggaccacgct

SEQ ID NO: 3397 - DNA, 295 bp, Homo sapiens
acagtaaaagcacatattcacacatgaagcgtggtattttacaaatacattcatattcaaagacatgggtgcttatgggagaggatggtgtaaagaaagggaaaaaagccataaaaccagagaatctttgcatgggactgtattcctgagatcccaaaccaaagggatgaatgtgctgttatgccttaaatgtgtgcaccaggaaatgcaaactagaaagggtggctctgaagggtcctcaggtgaggaagacccccagggctgagaatccaccaccttcatccttcaaaagagt

SEQ ID NO: 3398 - DNA, 538 bp, Homo sapiens
  misc_feature 521: n = A,T,C or G
accagaaccgagttcgggatactcacaggctcatcactcagatgcagctgagcctggcagaaagtgaagcttccttgggaaacactaacattcctgcctcagaccactacgtggggccaaatggctttaaaagtctggctcaggaggccacaagattagcagaaagccacgttgagtcagccagtaacatggagcaactgacaagggaaactgaggactattccaaacaagccctctcactggtgcgcaaggccctgcatgaaggagtcggaagcggaagcggtagcccggacggtgctgtggtgcaagggcttgtggaaaaattggagaaaaccaagtccctggcccagcagttgacaagggaggccactcaagcggaaattgaagcagataggtcttatcagcacagtctccgcctcccggattcagtgtctcggcttcagggagtcagtgatcagtcctttcaggtggaagaagcaaagaggatcaaacaaaaagcggattcactctcaagcctggtnaccaggcatatggatga

SEQ ID NO: 3399 - DNA, 80 bp, Homo sapiens; identical to SEQ ID NO: 3121

SEQ ID NO: 3400 - DNA, 230 bp, Homo sapiens; identical to SEQ ID NO: 3096

SEQ ID NO: 3401 - DNA, 522 bp, Homo sapiens
acctggaaaggatctgttttttgaaaagcatacacccaagttttacttttgaaatcctaaggtcttggttttgaaaaccccaggcgctaaggaaattacatgttttaaaatcctaaaggttgaggaattaatattctaaacttcaaatttttgaataatcatgacgttattggcaaatacatataaataaacatataaccggaacacgtttttcccctttatccaatggaaatacgatcaagcatcactcttagcagaagactaccagacacttgtagggacacgaaaagtgataataaaaacaatttatttattgaatgcttgctatagaccagatgctcttctaagcactttgtaattattttatcttgaaagcagtcctgtatttataatcattacctcttcttacagatgtggaagacgtgactcagtttcctgattacccagggtcacataacatgtgtggagaaggcaggatttaccacctcagtccgcagttcatgctcttaaccataatgctgt

SEQ ID NO: 3402 - DNA, 480 bp, Homo sapiens
agaacatcaggatcgtgggagcagaagtggcatattttgttgaatttcttcagtcggcgttcggttactcaccttccaacgtgcatgtcattggccacagcctgggtgcccacgctgctggggaggctggaaggagaaccaatgggaccattggacgcatcacagggttggacccagcagaaccttgctttcagggcacacctgaattagtccgattggaccccagcgatgccaaatttgtggatgtaattcacacggatggtgcccccatagtccccaatttggggtttggaatgagccaagtcgtgggccacctagatttctttccaaatggaggagtggaaatgcctggatgtaaaaagaacattctctctcagattgtggacatagacggaatctgggaagggactcgagactttgcggcctgtaatcacttaagaagctacaaatattacactgatagcatcgtcaaccctgatg

SEQ ID NO: 3403 - DNA, 450 bp, Homo sapiens
actatctggtttgagagtgcccttgaaaatttcatactgcttagagtttcctttatttccgaacaaagaaactagtatgtgtcctgtaaccttttttccagacagtgtgacagataccttatacctccaacgtgcaaaattactggcatcaccagtgtctagataaaatttctggcccacatcatttgttttcccaggatatctatcagcatagtgacccatctgtgggcagcctccacttggacaagggaaacacttgtttgcagtgaagacgttgtaagaggcacaggggaatccagcaaagccatcagggttgacgatgctatcagtgtaatatttgtagcttcttaagtgattacaggccgcaaagtctcgagtcccttcccagattccgtctatgtccacaatctgagagagaatgttctttttacatccaggcatttccactcc

SEQ ID NO: 3404 - DNA, 251 bp, Homo sapiens
cccaccttggcctcctagagtgctgggattacaggtgtgagccactgtgcccagcctcttttgccttcttaaagactttggtcgggtatttgtgttgttgagtattgtgtctgggtgtgggtatttgattctttttttgttttgtgtttttggctgtcctgtctattggatgtgatatgttatggatgtgatgtgttagtgtcgagcgtgctgtagaatctcccatttctgaaacaggcgtgaaaacctgt

SEQ ID NO: 3405 - DNA, 274 bp, Homo sapiens
cttgccgtccggagcccctggagtaggcgcttccggccattcatactgcagtcggtcagtgttcggttgaaggattctgtgtgctgtcggacccagagggtgacggcgccgctaggatgaagctcgtgagatttttgatgaaattgagtcatgaaactgtaaccattgaattgaagaacggaacacaggtccatggaacaatcacaggtgtggatgtcagcatgaatacacatcttaaagctgtgaaaatgaccctgaagaacagagaacctgt

SEQ ID NO: 3406 - DNA, 476 bp, Homo sapiens
cggaactgccacgatgctgccactttggactctttcactgctgctgggagcagtagcaggaaaagaagtttgctacgaaagactcggctgcttcagtgatgactccccatggtcaggaattacggaaagacccctccatatattgccttggtctccaaaagatgtcaacacccgcttcctcctatatactaatgagaacccaaacaactttcaagaagttgccgcagattcatcaagcatcagtggctccaatttcaaaacaaatagaaaaactcgctttattattcatggattcatagacaagggagaagaaaactggctggccaatgtgtgcaagaatctgttcaaggtggaaagtgtgaactgtatctgtgtggactggaaaggtggctcccgaactggatacacacaagcctcgcagaacatcaggatcgtgggagcagaagtggcatattttgttgaatttcttcagtcgg

SEQ ID NO: 3407 - DNA, 331 bp, Homo sapiens; identical to SEQ ID NO: 3037

SEQ ID NO: 3408 - DNA, 521 bp, Homo sapiens
cccccatagtccccaatttggggtttggaatgagccaagtcgtgggccacctagatttctttccaaatggaggagtggaaatgcctggatgtaaaaagaacattctctctcagattgtggacatagacggaatctgggaagggactcgagactttgcggcctgtaatcacttaagaagctacaaatattacactgatagcatcgtcaaccctgatggctttgctggattcccctgtgcctcttacaacgtcttcactgcaaacaagtgtttcccttgtccaagtggaggctgcccacagatgggtcactatgctgatagatatcctgggaaaacaaatgatgtgggccagaaattttatctagacactggtgatgccagtaattttgcacgttggaggtataaggtatctgtcacactgtctggaaaaaaggttacaggacacatactagtttctttgttcggaaataaaggaaactctaagcagtatgaaattttcaagggcactctcaaaccagatagt

SEQ ID NO: 3409 - DNA, 510 bp, Homo sapiens
ggaactgccacgatgctgccactttggactctttcactgctgctgggagcagtagcaggaaaagaagtttgctacgaaagactcggctgcttcagtgatgactccccatggtcaggaattacggaaagacccctccatatattgccttggtctccaaaagatgtcaacacccgcttcctcctatatactaatgagaacccaaacaactttcaagaagttgccgcagattcatcaagcatcaggggctccaatttcaaaacaaatagaaaaactcgctttattattcatggattcatagacaagggagaagaaaactggctggccaatgtgtgcaagaatctgttcaaggtggaaagtgtgaactgtatctgtgtggactggaaaggtggctcccgaactggatacacacaagcctcgcagaacatcaggatcgtgggagcagaagtggcatattttgttgaatttcttcagtcggcgttcggttactcaccttccaacgtgcatgtcatt

SEQ ID NO: 3410 - DNA, 342 bp, Homo sapiens
actaatacatggcattaaggttcagaacctaatataggcctgacaatcaagtccttattttctggaggaaggcctcaagtccaataaatttccagtaacaatgtttttacaaatcaatttaataataaggggttttaatttccttcatgtttttgtttttagcattctagtcttaagactagattagaagttagctcaattccccaaaaagcaaatggtttttctttgcagtatgaaagaatccacaaaaaaacctcttccccaaactaattcctaataaccaatctgtgcttaagatgtatctttttctatacaatgtaaacggtaacttaggtaaaatgt

SEQ ID NO: 3411 - DNA, 462 bp, Homo sapiens
acctgtggaagttacttcaaccctggaagtagggactttccagcagtcccatattctggatgggatttcaatgatggtaaatgtaaaactggaagtggagatatcgagaactacaatgatgctactcaggtcagagattgtcgtctgactggtcttcttgatcttgcactggagaaggattacgtgcgttctaagattgccgaatatatgaaccatctcattgacattggtgttgcagggttcagacttgatgcttccaagcacatgtggcctggagacataaaggcaattttggacaaactgcataatctaaacagtaactggttccctgcaggaagtaaacctttcatttaccaggaggtaattgatctgggtggtgagccaattaaaagcagtgactactttggtaatggccgagtgacagaattcaagtatggtgcaaaactcggcacagttattcgc

SEQ ID NO: 3412 - DNA, 213 bp, Homo sapiens
acacatatggcccgggagctacaacaatctatcctgctgctgggggctctgacgactgggcttatgaccaaggaatcagatattccttcacctttgaacttcgagatacaggcagatatggctttctccttccagaatcccagatccgggctacctgcgaggagaccttcctggcaatcgagtatgttgccagctacgtcctggaacacctgt

SEQ ID NO: 3413 - DNA, 589 bp, Homo sapiens
  misc_feature 524: n = A,T,C or G
acaagagcatttctttcaaaccacaggttaacacacactaaagagcaatgctgttagaggagcagagaaactttggaaaactctgctgtctgaaataaaagcaaggcactctccattaacagctggtggcttcctgatttccgcccacagaaggcatgttcacactgagagagctctcccgccaaggggaggaatcacctgctttaatacatgttgttctcttctgtgctagtgtggtcatccactctgtataaacttatgtgcaacattaagacaaaaaaaagggagttgagttgataagatgacttgggaggctctcatagttgtaataactatggaagacagaagaacatgctatcatctttatttttagcactcatatctggacctattactaaaaaagcttcttcattccttccaaccactagattataatggctaaaaagtcttttccttaaatctgatgggtgtaaaaataaaaagtaacagcatttctctagggctctgtttttattttgttttgntcttcctttatagacacgacaaaaacaaggattaactttccaaatactcatggtgcacaagaagg

SEQ ID NO: 3414 - DNA, 599 bp, Homo sapiens
ttcggttactcaccttccaacgtgcatgtcattggccacagcctgggtgcccacgctgctggggaggctggaaggagaaccaatgggaccattggacgcatcacagggttggacccagcagaaccttgctttcagggcacacctgaattagtccgattggaccccagcgatgccaaatttgtggatgtaattcacacggatggtgcccccatagtccccaatttggggtttggaatgagccaagtcgtgggccacctagatttctttccaaatggaggagtggaaatgcctgaatgtaaaaagagcattctctctcagattgtggacatagacggaatctgggaagggactcgagactttgcggcctgtaatcacttaagaagctacaaatattacactgatagcatcgtcaaccctgatggctttgctggattcccctgtgcctcttacaacgtcttcactgcaaacaagtgtttcccttgtccaagtggaggctgcccacagatgggtcactatgctgatagatatcctgggaaaacaaaatgatgtgggccagaaattttatctagacactggtgatgccagtaattttgcacgtt

SEQ ID NO: 3415 - DNA, 543 bp, Homo sapiens
  misc_feature 467, 524: n = A,T,C or G
acagcaccggccgatgctggaggagagaatcgtggagctgtttagaaacttaatgaaaagtgcctttgtggtggagcggcagccctgcatgcccatgcatcctgaccggcccctcgtcatcaagaccggcgtccagttcactactaaagtcaggttgctggtcaaattccctgagttgaattatcagcttaaaattaaagtgtgcattgacaaagactctggggacgttgcagctctcagaggatcccggaaatttaacattctgggcacaaacacaaaagtgatgaacatggaagaatccaacaacggcagcctctctgcagaattcaaacacttgaccctgagggagcagagatgtgggaatgggggccgagccaattgtgatgcttccctgattgtgactgaggagctgcacctgatcacctttgagaccgaggtgtatcaccaaggcctcaagattgacctanagacccactccttgccagttgtggtgatctccaacatctgtcagatgccaaatgccntgggcgtccatcctgtggt

SEQ ID NO: 3416 - DNA, 506 bp, Homo sapiens
  misc_feature 497: n = A,T,C or G
cggaactgccacgatgctgccactttggactctttcactgctgctgggagcagtagcaggaaaagaagtttgctacgaaagactcggctgcttcagtgatgactccccatggtcaggaattacggaaagacccctccatatattgccttggtctccaaaagatgtcaacacccgcttcctcctatatactaatgagaacccaaacaactttcaagaagttgccgcagattcatcaagcatcagtggctccaatttcaaaacaaatagaaaaactcgctttattattcatggattcatagacaagggagaagaaaactggctggtcaatgtgtgcaagaatctgttcaaggtggaaagtgtgaactgtatctgtgtggactggaaaggtggctcccgaactggatacacacaagcctcgcagaacatcaggatcgtgggagcagaagtggcatattttgttgaatttcttcagtcggcgttcggttactcaccttccnacgtgcatg

SEQ ID NO: 3417 - DNA, 294 bp, Homo sapiens
actcattccaatgaatttgactcagatgtggatgttggggacttgcagatggttaaatttatttggtataacaatgtgatcaacccaactttacctagagtgggagcatccaagattatagtggagacaaatgttggaaaacagttcaacttctgtagtccagaaaccgtcagggaggaagttctgctcaccctcacaccgtgttaggagactactgttatttgaccaatgaattgacttctaataaaatctagtggtgatgcaaaaaaaaaaaaaaaaaaaaaaaaagcttgt

SEQ ID NO: 3418 - DNA, 411 bp, Homo sapiens
actgaatgtcatctgcatggtcggcccccacccatttggggtagacgggcatccgagagggatgggaaaacaggtaggcgtaggtcttggcactcttggcattggctctgtgctgggctagggcaatctcggtgggcaccaggaagaggacatcggtctcaaagtccaccacagtcttcttcttattctcctgggatgggtcctgggcccaggactcggtgtagacatcaaaggtcgtcttggcgcctctgagccccttggtgattgtgaactcactgaccagcttgtagaagtcctcctccgtgactttcttgttgcccttgttgatggcaggcatgtcgatgctggcgaagatgtggccgtccatgttgttggtgcctgctatatagtcgatgtcggcggcgttggcgt

SEQ ID NO: 3419 - DNA, 542 bp, Homo sapiens
  misc_feature 479, 498, 499: n = A,T,C or G
cggaactgccacgatgctgccactttggactctttcactgctgctgggagcagtagcaggaaaagaagtttgctacgaaagactcggctgcttcagtgatgactccccatggtcaggaattacggaaagacccctccatatattgccttggtctccaaaagatgtcaccacccgcttcctcctatatactaatgagaacccaaacaactttcaagaagttgccgcagattcatcaagcatcagtggctccaatttcaaaacaaatagaaaaactcgctttattattcatggattcatagacaagggagaagaaaactggctggccaatgtgtgcaagaatctgttcaaggtggaaagtgtgaactgtatctgtgtggactggaaaggtggctcccgaactggatacacacaagcctcgcagaacatcaggatcgtgggagcagaagtggcatattttgttgaatttcttcagtcggcgntcggttactcaccttccanngtgcatgtcattggccacagcctgggtgcccacgctgctgggg

SEQ ID NO: 3420 - DNA, 558 bp, Homo sapiens
acaccatggtgaaccacggcatgagcatcgacaggaggcacgtgatgctgctctccgacctcatgacctacaagggtgaagtcctgggcatcactaggtttggcctggccaagatgaaggagagtgtgctgatgctggcctcctttgagaagacggctgaccatctctttgacgctgcctacttcggacagaaggactctgtgtgtggggtgtctgagtgcatcatcatgggaatcccaatgaacattggaaccgggctcttcaagctgcttcacaaggctgacagggacccgaaccctcccaagaggcccctgaccttcgacacaaatgaattccacatcccccttgtcacatagtccaaagaaagaggggaccatgcctgaccttgactccttgtcctgtctccagctgatgtataaagagttttgtgctccctgggacgggggtcctgaggtccccacctatgccagcaatcagagaaagccctcttggcatccccaggagcagcttctcctctgatagggtgcagctcacaccagtgaccctgactgtgccacg

SEQ ID NO: 3421 - DNA, 411 bp, Homo sapiens
acaaagcatgctgctgggctgggcatcaggcgtggcacagcaaacaagacagactgactcaaccctcagggggcttacattctaatgcagaaagcagataatttcagtttggatacataatacaaattatcaaagcaaggcgcaaagtattttaaaaataaggggtttgggaggccaagatctgacctattctgtagaaggactccttaggaaagtaacagttgagccaatctaaggatgctagatattcagtaggtcagtggaaaaaatcagtggttctcactgtggtcagtgggttattggtggtttcataataactggggactactcccagcactgagtggatgcagccagggagaacgatgtcctgcagtgtgtgggttagtgccacacaacgaagaattattccgt

SEQ ID NO: 3422 - DNA, 165 bp, Homo sapiens
acaggtgttccaggacgtagctggcaacatacttgattgccaggaaggtctcctcgcaggtagcccggatctgggattctggaaggagaaagccatatctgcctgtatctcgaagttcaaaggtgaaggaatatctgattccttggtcataagcccagtcgtcag

SEQ ID NO: 3423 - DNA, 207 bp, Homo sapiens; identical to SEQ ID NO: 2996

SEQ ID NO: 3424 - DNA, 439 bp, Homo sapiens
actagttgctggcccagagtaagcactatataatttttagctattagtaattatgagtaacctaattaccatctattgaacactgcttactgtatggccaatactgtaaagtgttcttatattctttagttctagtccttctgtcattcctatgaagtaggtatacttcccattttacagagtcagtcatttagtgtaacttttccaaggtcacatagtaagtggcagatccagaattcatacatgtaagtgcttgctcattccactatgccactctcctatttagagtgctggaactgggacagtttctgatcttctgaaatatttgtggtttggagttttaagtggaaaatttttaagagagtgaagcaaagcttcttctaggaactttgtgaatcttaaagctggtaaattagacatttaagtatcttctaggagt

SEQ ID NO: 3425 - DNA, 142 bp, Homo sapiens
actgcagggagacctgccagggccagctgttgggcctcgcttcttcaccgccaaccaccctagtcacataaggtgggtaagtggggtccccacaactgagggctccagccaccaaagtggacagcagcagcgtccttatcat

SEQ ID NO: 3426 - DNA, 377 bp, Homo sapiens
accgaccatagagcaagaatcaagattctgctaactcctgcacagccccgtcctcttcctttctgctagcctggctaaatctgctcattatttcagaggggaaacctagcaaactaagagtgataagggccctactacactggcttttttaggcttagagacagaaactttagcattggcccagtagtggcttctagctctaaatgtttgccccgccatccctttccacagtatccttcttccctcctcccctgtctctggctgtctcgagcagtctagaagagtgcatctccagcctatgaaacagctgggtctttggccataagaagtaaagatttgaagacagaaggaagaaactcaggagtaagcttctagac

SEQ ID NO: 3427 - DNA, 254 bp, Homo sapiens
accctaagaattaattagattttatttcttatgctcgaaatttgctacacaaggacttatctaacctttattttgctctgttgctgacttgattcaagtctcagtgtgttctgtgctgactgtaagatgcagaagtcctcacacctggcaaagaagagttcaaactgaaaaggggtttggtgcttcctggtttgtccaggttacctgttattaatttattattagcagcccaagaggagatatgtgcccaatgt

SEQ ID NO: 3428 - DNA, 298 bp, Homo sapiens
accttgcagagaataggcattgaaatattatttaaacaatcaaaccaaagatgttcttctatcttcagctgtcagtgatctaatgccctcatctctcttatcctcaggacccagaatggtatattccacataaaagatgctttgtttatcaaatgaatcaaaaagcacgcctgaggcatttatttttactcctttacttctgtaggccaggtcaaggtgggtctaattcacttttatcatcagcacttaagaaactggatggaagaccacaacaccttgttttttgcaaaaattttcc

SEQ ID NO: 3429 - DNA, 481 bp, Homo sapiens
actcagtaatgaaagtcacattaacaaagaaaagcaagttctcgcttgaggactgagaaaaaccaagtaatcctgagacaaattctgatgggtgaaaaagatgaaactgagattgcactctacagccccaaattgatatgcaataacccctatcagtcacaatgtaaagaggcctacaggtgtgcactgaattattcccaaaaccattcacccttccccacaccgtctctgcaccaagcaccaaaaatttgataaaaactattacttattgaaaaccacttaaaattgcaatgaaaaaaattttaaatccttaccaaaacagagaaagaaaaaacaaaatgcttaccaagcccacaatatagctttcaagatatttagattaaactctaacctattgtatcttaagcacataataaggcacataataagaaattaagtaaatacacagtaattctgagtaagtattagagattatagtggt

SEQ ID NO: 3430 - DNA, 336 bp, Homo sapiens
actcacaacaatgagcagcattgtaagttgtgatgcattcatttggattggaacattctcaatcagtccttccactctaagtaaatatttgtttctcacagaacacaaggcagttcaaagggcctcctgttagagatttataggtgtatgaatgggaaacatcatacaagcagtgaaaacaaaaatctttccaggttgtcggattttctccttcttggtcttataaaaagcaactagacatctttaatttaaaaaatacatgcacatatatacaatagtgattggaatgttatttttatccaaaacatcatagagtttatctcagatatactgagt

SEQ ID NO: 3431 - DNA, 485 bp, Homo sapiens
actatctggtttgagagtgcccttgaaaatttcatactgcttagagtttcctttatttccgaacaaagaaactagtatgtgtcctgtaaccttttttccagacagtgtgacagataccttatacctccaacgtgcaaaattactggcatcaccagtgtctagataaaatttctggcccacatcatttgttttcccaggatatctatcagcatagtgacccatctgtgggcagcctccacttggacaagggaaacacttgtttgcagtgaagacgttgtaagaggcacaggggaatccagcaaagccatcagggttgacgatgctatcagtgtaatatttgtagcttcttaagtgattacaggccgcaaagtctcgagtcccttcccagattccgtctatgtccacaatctgagagagaatgttctttttacatccaggcatttccactcctccatttggaaagaaatctaggtggcccacgactt

SEQ ID NO: 3432 - DNA, 230 bp, Homo sapiens; identical to SEQ ID NO: 3096

SEQ ID NO: 3433 - DNA, 230 bp, Homo sapiens; identical to SEQ ID NO: 3096

SEQ ID NO: 3434 - DNA, 549 bp, Homo sapiens
  misc_feature 502, 503: n = A,T,C or G
gacggaactgccacgatgctgccactttggactctttcactgctgctgggagcagtagcaggaaaagaagtttgctacgaaagactcggctgcttcagtgatgactccccatggtcaggaattacggaaagacccctccatatattgccttggtctccaaaagatgtcaacacccgcttcctcctatatactaatgagaacccaaacaactttcaagaagttgccgcagattcatcaagcatcagtggctccaatttcaaaacaaatagaaaaactcgctttattattcatggattcatagacaagggggaagaaaactggctggccaatgtgtgcaagaatctgttcaaggtggaaagtgtgaactgtatctgtgtggactggaaaggtggctcccgaactggatacacacaagcctcgcagaacatcaggatcgtgggagcagaagtggcatattttgttgaatttcttcagtcggcgttcggttactcaccttccaacnntgcatgtcattggccacagcctgggtgcccacgctgctggggaggc

SEQ ID NO: 3435 - DNA, 230 bp, Homo sapiens; identical to SEQ ID NO: 3096

SEQ ID NO: 3436 - DNA, 331 bp, Homo sapiens
  misc_feature 36: n = A,T,C or G
acctatggacgtgagatccaagtgacagagcttctnaacaagttagacttttatgtcctgcctgtgctcaatattgatggctacatctacacctggaccaagagccgattttggagaaagactcgctccacccatactggatctagctgcattggcacagaccccaacagaaattttgatgctggttggtgtgaaattggagcctctcgaaacccctgtgatgaaacttactgtggacctgccgcagagtctgaaaaggagaccaaggccctggctgatttcatccgcaacaaactctcttccatcaaggcatatctgacaatccactcgt

SEQ ID NO: 3437 - DNA, 368 bp, Homo sapiens
acacccagtggctcatatttaacttcccccagcttcccaattcaaactggggggaaaaaaactaaatcattgggagttacttgccaacttggaagttgatatttctttactttttccattctaagactttaagttctctggcatgagtttatctgcaatcataaactaaacaattacctaaacccaccccaccaatcccaaccgtaacaggccactgccaactaattgccaatatttgcccctcccctttaataaaacttttaagaagtcacattattggaaaacttaacttcaacatttggcctactcaagctcttctgaagttctcctgagatgactgaatacgaaccaaagctgcactgtgctgt

SEQ ID NO: 3438 - DNA, 411 bp, Homo sapiens; identical to SEQ ID NO: 3041

SEQ ID NO: 3439 - DNA, 464 bp, Homo sapiens
acatagtgacattgcaatacacaaaatatacagtgatcagattagggtaattagtatatccatcatcttaagcatttatcatttctttctgttgagaacattcaatatcctccttctagctatttagaatatatattattgttaactgtagtcatcctacagagctatagaacactacaacttaatcttcctatctagctgtaattttgtatcttttaacaaatttcttcctatcccccattaccttttaaattaaatttattttaataattaggtaacctactcatgtaatttaaaaaccaaaatgatatgaaaaggtctacagtgcttctactcctgtcactactcctctgttctcccatcttgtttggtatggatcttttgaatccttctgagagtttctttaggcaattaaaagcaaatacacatatgcaaaaggaatcatactatatatgttattttgt

SEQ ID NO: 3440 - DNA, 306 bp, Homo sapiens
actatctggtttgagagtgcccttgaaaatttcatactgcttagagtttcctttatttccgaacaaagaaactagtatgtgtcctgtaaccttttttccagacagtgtgacagataccttatacctccaacgtgcaaaattactggcatcaccagtgtctagataaaatttctggcccacatcatttgttttcccaggatatctatcagcatagtgacccatctgtgggcagcctccacttggacaagggaaacacttgtttgcagtgaagacgttgtaagaggcacaggggaatccagcaaagcc

SEQ ID NO: 3441 - DNA, 230 bp, Homo sapiens; identical to SEQ ID NO: 3181

SEQ ID NO: 3442 - DNA, 295 bp, Homo sapiens
actgaatgtcatctgcatggtcggcccccacccatttggggtagacgggcatccgagagggatgggaaaacaggtaggcgtaggtcttggcactcttggcattggctctgtgctgggctagggcaatctcggtgggcaccaggaagaggacatcggtctcaaagtccaccacagtcttcttcttattctcctgggatgggtcctgggcccaggactcagtgtagacatcaaaggtcgtcttggcgcctctgagccccttggtgattgtgaactcactgaccagcttgtagaagtc

SEQ ID NO: 3443 - DNA, 340 bp, Homo sapiens
actcatttgggggacttgtctgtcaatctggaggatcatgtctgactagctggggtccatccatcaagacatcaagatgagagtctggccggctggctgggatgtcaggattccatgtggctgatgtctgcctgtctggcagtccatctggttggttaggagtctgtctggccagaaggtctgtcagccagccagcccacctgagggtgggggtggggtctgagaactctgtgtatctgttcagcaggggatctgtttatatctgtatagtaatctaacttagggggtccacctggctgtccagctagcagagatgtctgtcttttgggggctctgtttg

SEQ ID NO: 3444 - DNA, 533 bp, Homo sapiens
  misc_feature 498, 500, 511: n = A,T,C or G
taaaaataatcctcagtttttgtgaaaagctccatttttagtgaaatattattttatagctactaattttaaaatgtcttgcttgattgtatggtgggaagttggctggtgtcccttgtctttgccaagttctccactagctatggtgtcataggctcttttgggatttttgaagctgtatactgtgtgctaaaacaagcactaaacaaagagtgaaggatttatgtttaattctgaaagcaaccttcttgcctagtgttctgatattggacagtaaaatccacagaccaacctggagttgaaaatcttataatttaaaatatgctctaaacatgtttatcgtatttgatgctacaggatttgaaattgtattacaaatccaatgaaatgagtttttcttttcatttacctctgccccagttgtttctactacatggaagacctcattttgaagggaaatttcagcagctgcagctcatgagtaactgatttgtaacnangcccccttttnaagtaaccctacaaaaccactg

SEQ ID NO: 3445 - DNA, 207 bp, Homo sapiens; identical to SEQ ID NO: 2996

SEQ ID NO: 3446 - DNA, 373 bp, Homo sapiens
accgcagtttgtgctgaatgatatgtttggggtaaatcagtttttttcttatagaatttcggcgtttttgctgcaactgccactaattttgcatttaaaagaacaaaagaggaatgtatttttcaaaggagtgaatgaggttaaaatcaagattttgaatggtataaatatgcaactaattcagttgtaggatattattaaattttttattgctaaatatgtttctttcatacgttgcagtgcttacagttccaacagctttccaagaaaacatttccatacttgtgttatttgtaaagtatacataaataatgtaaaataatttgggattatttcaactttacattgtatgtctgaatttcatcgatgttgt

SEQ ID NO: 3447 - DNA, 331 bp, Homo sapiens; identical to SEQ ID NO: 3009

SEQ ID NO: 3448 - DNA, 575 bp, Homo sapiens
actatctggtttgagagtgcccttgaaaatttcatactgcttagagtttcctttatttccgaacaaagaaactagtatgtgtcctgtaaccttttttccagacagtgtgacagataccttatacctccaacgtgcaaaattactggcatcaccagtgtctagataaaatttctggcccacatcatttgttttcccaggatatctatcagcatagtgacccatctgtgggcagcctccacttggacaagggaaacacttgtttgcagtgaagacgttgtaagaggcacaggggaatccagcaaagccatcagggttgacgatgctatcagtgtaatatttgtagcttcttaagtgattacaggccgcaaagtctcgagtcccttcccagattccgtctatgtccacaatctgagagagaatgttctttttacatccaggcatttccactcctccatttggaaagaaatctaggtggcccacgacttggctcattccaaaccccaaattggggactatgggggcaccatccgtgtgaattacatccacaaatttggcatcgctggggtccaatcgga

SEQ ID NO: 3449 - DNA, 301 bp, Homo sapiens
  misc_feature 47, 66, 79, 86, 94, 113, 120, 128, 152, 165, 218, 229, 238,271, 282: n = A,T,C or G
acaagcttttttttttttttttttttttttttttttttttctttttngaccccaagggtcagtttnttcaattcatgancagtcanaacagganatgcttaggaaggaatcgnggctggngccccttntccatgctcatcccataccccagngacaggataccgnttccctgaagttaaaaacatgcaccaaatttccggtaaaggctggagccacanagggcacctancaagcttgntttcaaggtcccatcaacaaatgaaaagggcancccgaggacanattgacaaaaaccccacta

SEQ ID NO: 3450 - DNA, 190 bp, Homo sapiens
ctctggtgcagcatgatgctgcccccttggaccctcggccttctcctgctggccacagtcagaggaaaagaggtctgctacggacaacttggctgcttttctgatgaaaaaccatgggcaggaacccttcagcgacctgtaaaattacttccctggtcccccgaggacattgacacccgctttcttctgt

SEQ ID NO: 3451 - DNA, 270 bp, Homo sapiens
  misc_feature 166: n = A,T,C or G
aaactgcagcagcatcttgcagacagaggagaggaactgggtatctgtgaccagccccgtccaggctagtgcctgcaggaacattctggagagaaatcaaacccatgccatctacaaaaacaccctctccttggtcaatgatttcatcatcagagacaccatcctnaacatcaacttccaatgtgcctacccactggacatgaaagtcagcctccaagctgccttgcagcccattgtaagttccctgaacgtcagtgtggacgggaatgg

SEQ ID NO: 3452 - DNA, 543 bp, Homo sapiens
  misc_feature 458, 529, 534: n = A,T,C or G
acaaaacatcctactgaagattttttttttaaatatacaagtcagtttaaaatgatagaagttctgtgagaactaagaaatctacagcctgtagtttaataatagaaaaaaaattaagacaattaaaagatctatagcatccagcattttgcttaattccctgtttatagcacctatttctctaggttcgaagatgagaattccagaacctgtggtatgtgctgtgtaacaagttagggtggacttgctgtctctcctctccagtagccccccaccattaaaaggagaatatatatataattttttttccaatttcccttcttacacccagagaagagggggacaactgggagaacaagttaaaaaactggggtgcaggaataaatatgacttttcctttccccaaaatgggatgttgacagaaaagcagagtatgtgcttagaggaactggtgggtngggaacagctgttatctttgacatgatgtgtaaaaatcagggaacaagtggacatcacagtcagctgcctncaagntttaaaaac

SEQ ID NO: 3453 - DNA, 536 bp, Homo sapiens
ggaactgccacgatgctgccactttggactctttcactgctgctgggagcagtagcaggaaaagaagtttgctacgaaagactcggctgcttcagtgatgactccccatggtcaggaattacggaaagacccctccatatattgccttggtctccaaaagatgtcaacacccgcttcctcctatatactaatgagaacccaaacaactttcaagaagttgccgcagattcatcaagcatcagtggctccaatttcaaaacaaatagaaaaactcgctttattattcatggattcatagacaagggagaagaaaactggctggccaatgtgtgcaagaatctgttcaaggtggaaagtgtgaactgtatctgtgtggactggaaaggtggctcccgaactggatacacacaagcctcgcagaacatcaggatcgtgggagcagaagtggcatattttgttgaatttcttcagtcggcgttcggttactcaccttccaacgtgcatgtcattggccacagcctgggtgcccacgctgc

SEQ ID NO: 3454 - DNA, 456 bp, Homo sapiens
acacaatgagccattattatgattatccttctattgctcaccttgtccagaaactgagtgaaaataatattcagacaatttttgcagttactgaagaatttcagcctgtttacaaggagctgaaaaacttgatccctaagtcagcagtaggaacattatctgcaaattctagcaatgtaattcagttgatcattgatgcatacaattccctttcctcagaagtcattttggaaaacggcaaattgtcagaaggagtaacaataagttacaaatcttactgcaagaacggggtgaatggaacaggggaaaatggaagaaaatgttccaatatttccattggagatgaggttcaatttgaaattagcataacttcaaataagtgtccaaaaaaggattctgacagctttaaaattaggcctctgggctttacggaggaagtagaggttattcttcagt

SEQ ID NO: 3455 - DNA, 407 bp, Homo sapiens
acagacacaaacatataaatatatgtatgcacatatttgtcatacattttcaataaatgatatctttattattgtttaatgaccttttttctcttgtgaattttgacataaagtatattttataaaataagagagttgttgacttacgatgtattttgtataatacaattttgatctcttctgctctcatttggttgatgtttgcctaaaatgtcttcttccacttgccactttcaggctgatttcactactagatctcaagtgactcttgaagagaggcaagttggatcttggtatataaaattttatataatccctctattcaatgtatgtgtattgattggcaagtctatttttaaaatatttattttctgaagacaaagattactgttattttattgtttaat

SEQ ID NO: 3456 - DNA, 382 bp, Homo sapiens
actatctggtttgagagtgcccttgaaaatttcatactgcttagagtttcctttatttccgaacaaagaaactagtatgtgtcctgtaaccttttttccagacagtgtgacagataccttatacctccaacgtgcaaaattactggcatcaccagtgtctagataaaatttctggcccacatcatttgttttcccaggatatctatcagcatagtgacccatctgtgggcagcctccacttggacaagggaaacacttgtttgcagtgaagacgttgtaagaggcacaggggaatccagcaaagccatcagggttgacgatgctatcagtgtaatatttgtagcttcttaagtgattacaggccgcaaagtctcgagtccct

SEQ ID NO: 3457 - DNA, 411 bp, Homo sapiens; identical to SEQ ID NO: 3041

SEQ ID NO: 3458 - DNA, 255 bp, Homo sapiens
actagtgtgagttatgaggccatcggcatccactgggcgatgcacagcaggaccaggagcctgtgagggctgtggtcttggaggcactgcaggaggatgggcaacaactccagcctgttgttgtcctgcatgaatacaaaagttcttctttttagtaactgtataatcactttgttaatagaagaaataggctgaatgaatgtgactacatgataaagatttctaagaatgtttgttaagtattagaaggcaagt

SEQ ID NO: 3459 - DNA, 513 bp, Homo sapiens
gtccccaatttggggtttggaatgagccaagtcgtgggccacctagatttctttccaaatggaggagtggaaatgcctggatgtaaaaagaacattctctctcagattgtggacatagacggaatctgggaagggactcgagactttgcggcctgtaatcacttaagaagctacaaatattacactgatagcatcgtcaaccctgatggctttgctggattcccctgtgcctcttacaacgtcttcactgcaaacaagtgtttcccttgtccaagtggaggctgcccacagatgggtcactatgctgatagatatcctgggaaaacaaatgatgtgggccagaaattttatctagacactggtgatgccagtaattttgcacgttggaggtataaggtatctgtcacactgtctggaaaaaaggttacaggacacatactagtttctttgttcggaaataaaggaaactctaagcagtatgaaattttcaagggcactctcaaaccagatagt

SEQ ID NO: 3460 - DNA, 533 bp, Homo sapiens
  misc_feature 460: n = A,T,C or G
actatctggtttgagagtgcccttgaaaatttcatactgcttagagtttcctttatttccgaacaaagaaactagtatgtgtcctgtaaccttttttccagacagtgtgacagataccttatacctccaacgtgcaaaattactggcatcaccagtgtctagataaaatttctggcccacatcatttgttttcccaggatatctatcagcatagtgacccatctgtgggcagcctccacttggacaagggaaacacttgtttgcagtgaagacgttgtaagaggcacaggggaatccagcaaagccatcagggttgacgatgctatcagtgtaatatttgtagcttcttaagtgattacaggccgcaaagtctcgagtcccttcccagattccgtctatgtccacaatctgagagagaatgttctttttacatccaggcatttccactcctccatttggnaagaaatctaggtggcccacgacttggctcattccaaaccccaaattggggactatgggggcaccatccgtgt

SEQ ID NO: 3461 - DNA, 416 bp, Homo sapiens
actcaggtttttaagactaataaccacacaaggtgggtatctaagaaggcagctgttaatacattctccatctttcctgtctggcaacaggaaagatattattggtgagatagtgcaaaattgtgagaattggttatgtttgatgatgaataaattcaagatttttgaaggcttcactgctatttgggatgggaaggtgagtttacaaaatgaaaaaggtagatttttatgttacagaaatcagtaacgggtttcttgttgtgttaattgcctttcacttgatttgccatgatgtttcttcctcattattgatctagaagtttgcctcttggatagtaactagtaacttagtatctactttaaaatttgtggcttttctcttcagggtcccaggccataaaacaacggagagctgt

SEQ ID NO: 3462 - DNA, 216 bp, Homo sapiens
  misc_feature 188, 190: n = A,T,C or G
actagttgagaaagctgatggccttgtttcaaaattctcatttttcatttcttttctttcttgaattcttattttggtttgcctggatgttttgcagatcccaatctttcttttaagcttctgggtctattaaactaggtagatcttttcgtattgatcataataaaagtgaatcattactattggcncnaaaaaaaaaaaaaaaaaaaaagcttg

SEQ ID NO: 3463 - DNA, 213 bp, Homo sapiens
actgtgaggtttgatttgtgtgacagaatctggcttccagaagtcaatctgggtcgtgctggccaactcgcggattatgttaatgtgattttcatcttcaacgttaacacggaacaccttctcgccttcaaagtgctcaccaccatgatgagcagatgccagggccacagtcaccagaaccaagagtgccaacattgtgtctgaccaggtcta

SEQ ID NO: 3464 - DNA, 191 bp, Homo sapiens
accggttggaaggcactccctggtgtaatctgagatactgcacagacccatccactgtggaggacaagtgtgagaaggcctgccgccccgaggaggagtgccttgccctcaacagcacctggggctgtttctgcagacaggacctcaatagttctgatgtccacagtttgcagcctcagctagactgtggg

SEQ ID NO: 3465 - DNA, 262 bp, Homo sapiens
cttgtgctagctgtgctgctcacagtggccgccgccgacagcggcatcagccctcgggccgtgtggcagttccgcaaaatgatcaagtgcgtgatcccggggagtgaccccttcttggaatacaacaactacggctgctactgtggcttggggggctcaggcacccccgtggatgaactggacaagtgctgccagacacatgacaactgctatgaccaggccaagaagctggacagctgtaaatttctgctggacaacccgt

SEQ ID NO: 3466 - DNA, 525 bp, Homo sapiens
actagactctatcatttacttttaaaacatttaattagaaaaacaggtgatatttaagactatttataaacttattggctaaattgccaaaaagtttctttttctctaactttggtattctaaataattgattattgctcccattgtaaactgaaccatgtatgcactctcttttctgaccaaactacaatggtatattggtaaattatttaacaacacactgtccaggagggaaaaaaaaaaaaaacagtctctgatttgtatcatttgccaatttccatggtccaaatattctctctccattttcaaactaccaaagtgaccctaatcagcttacaaaattcctggaaatgtatctgccacctcttaccaaccagtgtgagctgacttcagcacaccactgagacagattacacgatagacagatagatagatagatagatagatattgatagagaacatgttgtgtctatatacatatccaatgacacacagtataatcatgttttaaattatgccaaaagt

SEQ ID NO: 3467 - DNA, 577 bp, Homo sapiens
actatctggtttgagagtgcccttgaaaatttcatactgcttagagtttcctttatttccgaacaaagaaactagtatgtgtcctgtaaccttttttccagacagtgtgacagataccttatacctccaacgtgcaaaattactggcatcaccagtgtctagataaaatttctggcccacatcatttgttttcccaggatatctatcagcatagtgacccatctgtgggcagcctccacttggacaagggaaacacttgtttgcagtgaagacgttgtaagaggcacaggggaatccagcaaagccatcagggttgacgatgctatcagtgtaatatttgtagcttcttaagtgattacaggccgcaaagtctcgagtcccttcccagattccgtctatgtccacaatctgagagagaatgttctttttacatccaggcatttccactcctccatttggaaagaaatctaggtggcccacgacttggctcattccaaaccccaaattggggactatgggggcaccatccgtgtgaattacatccacaaatttggcatcgctggggtccaatcggact

SEQ ID NO: 3468 - DNA, 218 bp, Homo sapiens
tcggctgctcagttccctcctccttgtggccgttgcctcaggctatggcccaccttcctctcactcttccagccgcgttgtccatggtgaggatgcggtcccctacagctggccctggcaggtttccctgcagtatgagaaaagtggaagcttctaccacacgtgtggcggtagcctcatcgcccccgattgggttgtgactgccggccactgcatct

SEQ ID NO: 3469 - DNA, 546 bp, Homo sapiens
acagaatgaaaactagaaaatttcaaccccagattatcttcaaccttgctccctccaccaatcatactttgacatttatctatttccttctccacttatggatgtaattggcttgctatagaaactacagttcagatgctttgaatgtatgaactacaatgaacaataaagtcctcttcttttgaagcatattttggcttcagctttaagataatcttatgacaagaagggtcacactgattcacttaataaattccattcttacctaacacaaggtttagttgataagcacttggacaaaaataatacttttcaaaaatgtaaagcaaactagtgaggacaaaggattttgtcctcatctcaacaatgatcagctattggaactgcatgaaactgaacaatttaaacctggagctggtaatgttcttaagaccaattcagaacaaaggcaggttgcccttaaaacaggtttgaccttttccttcactcttcctcctgtcccaccctctgtgagtgatttaaaaacggaaaaggtcaaagcccagc

SEQ ID NO: 3470 - DNA, 375 bp, Homo sapiens
cgagactttgcggcctgtaatcacttaagaagctacaaatattacactgatagcatcgtcaaccctgatggctttgttggattcccctgtgcctcttacaacgtcttcactgcaaacaagtgtttcccttgtccaagtggaggctgcccacagatgggtcactatgctgatagatatcctgggaaaacaaatgatgtgggccagaaattttatctagacactggtgatgccagtaattttgcacgttggaggtataaggtatctgtcacactgtctggaaaaaaggttacaggacacatactagtttctttgttcggaaataaaggaaactctaagcagtatgaaattttcaagggcactctcaaaccagatagt

SEQ ID NO: 3471 - DNA, 316 bp, Homo sapiens
gtgagatccaagtgacagagcttctcaacaagttagacttttatgtcctgcctgtgctcaatattgatggctacatctacacctggaccaagagccgattttggagaaagactcgctccacccatactggatctagctgcattggcacagaccccaacagaaattttgatgctggttggtgtgaaattggagcctctcgaaacccctgtgatgaaacttactgtggacctgccgcagagtctgaaaaggagaccaaggccctggctgatttcatccgcaacaaactctcttccatcaaggcatatctgacaatcca

SEQ ID NO: 3472 - DNA, 331 bp, Homo sapiens; identical to SEQ ID NO: 2994

SEQ ID NO: 3473 - DNA, 295 bp, Homo sapiens
  misc_feature 289: n = A,T,C or G
actcattccaatgaatttgactcagatgtggatgttggggacttgcagatggttaaatttatttggtataacaatgtgatcaacccaactttacctagagtgggagcatccaagattatagtggagacaaatgttggaaaacagttcaacttctgtagtccagaaaccgtcagggaggaagttctgctcaccctcacaccgtgttaggagactactgttatttgaccaatgaattgacttctaataaaatctagtggtgatccaaaaaaaaaaaaaaaaaaaaaaaaangcttgt

SEQ ID NO: 3474 - DNA, 449 bp, Homo sapiens
ggaattcattgctcggctggtgaaaggccgaggaaggcgagatttcccagaagaggtcgccattgttgaagaacttggccgcagacatgctgatggttctttctctgatgagatgaacaccattcttgataatcttgccgccagggactttataaactggttgattcagaccaaaatcactgacaggaaataactatatcactattcaagatcatcttcacaacatcacctgctagccacgtgggatgtttgaaatgttaagtcctgtaaatttaagaggtgtattttgaggccacattgctttgcatgccaataaataaattttcttttagtgttgtgtagccaaaaattacaaatggaataaagttttatcaaaatattgctaaaatatcagctttaaaatatgaaagtgctagattctgttattttcttcttattttggatgaagt

SEQ ID NO: 3475 - DNA, 360 bp, Homo sapiens
  misc_feature 348: n = A,T,C or G
cgagactttgcggcctgtaatcacttaagaagctacaaatattacactgatagcatcgtcaaccctgatggctttgctggattcccctgtgcctcttacaacgtcttcactgcaaacaagtgtttcccttgtccaagtggaggctgcccacagatgggtcactatgctgatagatatcctgggaaaacaaatgatgtgggccagaaattttatctagacactggtgatgccagtaattttgcacgttggaggtataaggtatctgtcacactgtctggaaaaaaggttacaggacacatactagtttctttgttcggaaataaaggaaactctaagcagtatgaaatnttcaagggcact

SEQ ID NO: 3476 - DNA, 415 bp, Homo sapiens
acttcactgcggacttgacttcttgagcaagaaggctggcactgttcattaagagaatcacagagatgaatctcacaatgcaggaaaactaggtcataatgtccagcaaacatgaacatctgaactgagaaccggctttccgaggactgcccattctcctccacgtggatggtggaatcacgctgatttgagcagctgtttctgatgatgaaatacttcacaaggtcagccttgtcttcagtgggggtggcatagcagttcctcaacaccaggttaaaccgggaggtgtccccttgttccaagatggcacccacatacagcacggactcaacagacagttcaactgcatccccttcgtaaggattcgtgtagttctggtcttggaagagggccatcctgacaatgaactctccat

SEQ ID NO: 3477 - DNA, 587 bp, Homo sapiens
  misc_feature 505: n = A,T,C or G
actatctggtttgagagtgcccttgaaaatttcatactgcttagagtttcctttatttccgaacaaagaaactagtatgtgtcctgtaaccttttttccagacagtgtgacagataccttatacctccaacgtgcaaaattactggcatcaccagtgtctagataaaatttctggcccacatcatttgttttcccaggatatctatcagcatagtgacccatctgtgggcagcctccacttggacaagggaaacacttgtttgcagtgaagacgttgtaagaggcacaggggaatccagcaaagccatcagggttgacgatgctatcagtgtaatatttgtagcttcttaagtgattacaggccgcaaagtctcgagtcccttcccagattccgtctatgtccacaatctgagagagaatgttctttttacatccaggcatttccactcctccatttggaaagaaatctaggtggcccacgacttggctcattccaaaccccaantggggactatgggggcaccatccgtgtgaattacatccacaaatttggcatcgctggggtccaatcggactaattcaggtgt

SEQ ID NO: 3478 - DNA, 498 bp, Homo sapiens
gacggaactgccacgatgctgccactttggactctttcactgctgctgggagcagtagcaggaaaagaagtttgctacgaaagactcggctgcttcagtgatgactccccatggtcaggaattacggaaagacccctccatatattgccttggtctccaaaagatgtcaacacccgcttcctcctatatactaatgagaacccaaacaactttcaagaagttgccgcagattcatcaagcatcagtggctccaatttcaaaacaaatagaaaaactcgctttattattcatggattcatagacaagggagaagaaaactggctggccaatgtgtgcaagaatctgttcaaggtggaaagtgtgaactgtatctgtgtggactggaaaggtggctcccgaactggatacacacaagcctcgcagaacatcaggatcgtgggagcagaagtggcatattttgttgaatttcttcagtcggcgttcggttactcaccttcc

SEQ ID NO: 3479 - DNA, 363 bp, Homo sapiens
acatttcagacacagtattttaattaatcattttttcacaaagcattggataacacttttagaaagatttgttttctgttcgtaaccatttcacgtgagaaaaaagcacagttgtcttctgatacttaattgtaaaagacctttgtgcctcttatgttctctactcataggtgggaattgaacaatgagaacacttggacacaggaaggggaacatcacacacccgggcctgtcctgagttggggggaggggagaggaatagcattaggagatatacctagtgtaaatgacgagttgatgggtgcagcacaccagcatggcacatgtatacatatgtaacaaacctgcacgttgtgcacatgt

SEQ ID NO: 3480 - DNA, 331 bp, Homo sapiens; identical to SEQ ID NO: 3037

SEQ ID NO: 3481 - DNA, 470 bp, Homo sapiens
acagtaaacattattcagtgagagatcagaaggaaacaaatggcatcttttcagaacgctgtcaactgttcccacaacccaagtctgtttttccaagttgcacaagtgcttggaataactctgaaacaattctcttcagagtttaaaggcttcagagtataggtgatgcttcctaaaacaagaagcctgtattaacatcacaaattggaactcattccaaagcctcttcttagagaaaaaaaaataaagaaataaaaaataaaaaatgtaaagaaggtcatgaaaaattcacatgcagctaattatcgtaaaaaatatcaaacacacacgcaaaaaactcaaaaagcaatttcatatatttctaagcctgagacgttccttatcagaaagattctacaccatagaaaagacagcattacaacatactagtatgaaaatctgctgatgtattttacttcttattctatttc

SEQ ID NO: 3482 - DNA, 551 bp, Homo sapiens
actatctggtttgagagtgcccttgaaaatttcatactgcttagagtttcctttatttccgaacaaagaaactagtatgtgtcctgtaaccttttttccagacagtgtgacagataccttatacctccaacgtgcaaaattactggcatcaccagtgtctagataaaatttctggcccacatcatttgttttcccaggatatctatcagcatagtgacccatctgtgggcagcctccacttggacaagggaaacacttgtttgcagtgaagacgttgtaagaggcacaggggaatccagcaaagccatcagggttgacgatgctatcagtgtaatatttgtagcttcttaagtgattacaggccgcaaagtctcgagtcccttcccagattccgtctatgtccacaatctgagagagaatgttctttttacatccaggcatttccactcctccatttggaaagaaatctaggtggcccacgacttggctcattccaaaccccaaattggggactatgggggcaccatccgtgtgaattacatccacaaatt

SEQ ID NO: 3483 - DNA, 299 bp, Homo sapiens
ctggattcccctgtgcctcttacaacgtcttcactgcaaacaagtgtttcccttgtccaagtggaggctgcccacagatgggtcactatgctgatagatatcctgggaaaacaaatgatgtgggccagaaattttatctagacactggtgatgccagtaattttgcacgttggaggtataaggtatctgtcacactgtctggaaaaaaggttacaggacacatactagtttctttgttcggaaataaaggaaactctaagcagtatgaaattttcaagggcactctcaaaccagatagt

SEQ ID NO: 3484 - DNA, 375 bp, Homo sapiens
cgagactttgcggcctgtaatcacttaagaagctacaaatattacactgatagcatcgtcaaccctgatggctttgctggattcccctgtgcctcttacaacgtcttcactgcaaacaagtgtttcccttgtccaagtggaggctgcccacagatgggtcactatgctgatagatatcctgggaaaacaaatgatgtgggccagaaattttatctagacactggtgatgccagtaattttgcacgttggaggtataaggtatctgtcacactgtctggaaaaaaggttacaggacacatactagtttctttgttcggaaataaaggaaactctaagcagtatgaaattttcaagggcactctcaaaccagatagt

SEQ ID NO: 3485 - DNA, 404 bp, Homo sapiens
actttctctatttcccagatgcaaatataattaattgactttatttatctaggaaatgttactcatatcttaattgtagtcattggcttgagtgacgggtttcggtaattcaactactattacttgaaagtagtagatttcataggatactgttataaaatctttttaacctcttttctgatttcaggagtaattagtaattgtggtttactggaaaattcaatgaatagggtgttaaaggaagcaattcattaataatatatgtaatctattgggagactgaggcgggtggatcacctgagttcaggagttcgagaccagcctggccaacatggcaaaactccgtctctactgaaaatagaaaaattcgccgggcatggtggtgcattcctgtattcccaggt

SEQ ID NO: 3486 - DNA, 298 bp, Homo sapiens
actcattccaatgaatttgactcagatgtggatgttggggacttgcagatggttaaatttatttggtataacaatgtgatcaacccaactttacctagagtgggagcatccaagattatagtggagacaaatgttggaaaacagttcaacttctgtagtccagaaaccgtcagggaggaagttctgctcaccctcacaccgtgttaggagactactgttatttgaccaatgaattgacttctaataaaatctagtggtgatgaaaaaaaaaaaaaaaaaaaaaaaaaaaaaagcttgt

SEQ ID NO: 3487 - DNA, 294 bp, Homo sapiens
  misc_feature 265, 266, 268: n = A,T,C or G
actcattccaatgaatttgactcagatgtggatgttggggacttgcagatggttaaatttatttggtataacaatgtgatcaacccaactttacctagagtgggagcatccaagattatagtggagacaaatgttggaaaacagttcaacttctgtagtccagaaaccgtcagggaggaagttctgctcaccctcacaccgtgttaggagactactgttatttgaccaatgaattgacttctaataaaatctagtggtgatgcannanaaaaaaaaaaaaaaaaaaaagcttgt

SEQ ID NO: 3488 - DNA, 515 bp, Homo sapiens
  misc_feature 469: n = A,T,C or G
gacggaactgccacgatgctgccactttggactctttcactgctgctgggagcagtagcaggaaaagaagtttgctacgaaagactcggctgcttcagtgatgactccccatggtcaggaattacggaaagacccctccatatattgccttggtctccaaaagatgtcaacacccgcttcctcctatatactaatgagaacccaaacaactttcaagaagttgccgcagattcatcaagcatcagtggctccaatttcaaaacaaatagaaaaactcgctttattattcatggattcatagacaagggagaagaaaactggctggccaatgtgtgcaagaatctgttcaaggtggaaagtgtgaactgtatctgtgtggactggaaaggtggctcccgaactggatacacacaagcctcgcagaacatcaggatcgtgggagcagaagtggcatattttgttgaatttnttcagtcggcgttcggttactcaccttccacgtgcatgtcattggc

SEQ ID NO: 3489 - DNA, 494 bp, Homo sapiens
  misc_feature 489: n = A,T,C or G
actatctggtttgagagtgcccttgaaaatttcatactgcttagagtttcctttatttccgaacaaagaaactagtatgtgtcctgtaaccttttttccagacagtgtgacagataccttatacctccaacgtgcaaaattactggcatcaccagtgtctagataaaatttctggcccacatcatttgttttcccaggatatctatcagcatagtgacccatctgtgggcagcctccacttggacaagggaaacacttgtttgcagtgaagacgttgtaagaggcacaggggaatccagcaaagccatcagggttgacgatgctatcagtgtaatatttgtagcttcttaagtgattacaggccgcaaagtctcgagtcccttcccagattcgtctatgcccacaatctgagagagaatgttctttttacatccaggcatttccactcctccatttggaaagaaatctaggtggcccacgacttggctnattcc

SEQ ID NO: 3490 - DNA, 195 bp, Homo sapiens
ctcgccctttcagccgcgttgtcaatggtgaggatgcggtcccctacagctggccctggcaggtttccctgcagtatgagaaaagtggaagcttctaccacacgtgcggcggtagcctcatcgcccccgactgggttgtgactgccggccactgcatctcgagctcctggacctaccaggtggtgttgggtgagt

SEQ ID NO: 3491 - DNA, 276 bp, Homo sapiens
gcaagatgaaactccttgtgctagctgtgctgctcacagtggccgccgccgacagcggcatcagccctcgggccgtgtggcagttccgcaaaatgatcaagtgcgtgatcccggggagtgaccccttcttggaatacaacaactacggctgctactgtggcttggggggctcaggcacccccgtggatgaactggacaagtgctgccagacacatgacaactgctatgaccaggccaagaagctggacagctgtaaatttctgctggacaacccgt

SEQ ID NO: 3492 - DNA, 495 bp, Homo sapiens
ggaactgccacgatgctgccactttggactctttcactgctgctgggagcagtagcaggaaaagaagtttgctacgaaagactcggctgcttcagtgatgactccccatggtcaggaattacggaaagacccctccatatattgccttggtctccaaaagatgtcaacacccgcttcctcctatatactaatgagaacccaaacaactttcaagaagttgccgcagattcatcaagcatcagtggctccaatttcaaaacaaatagaaaaactcgctttattattcatggattcatagacaagggagaagaaaactggctggccaatgtgtgcaagaatctgttcaaggtggaaagtgtgaactgtatctgtgtggactggaaaggtggctcccgaactggatacacacaagcctcgcagaacatcaggatcgtgggagcagaagtggcatattttgttgaatttcttcagtcggcgttcggttactcaccttcc

SEQ ID NO: 3493 - DNA, 425 bp, Homo sapiens
  misc_feature 48, 119, 218, 271, 273, 304, 312, 317, 322, 332, 345, 378,391: n = A,T,C or G
acaagctttttttttttttttttttttttttttttctgaaacaaagtnttgctctgttgcccaggctggagtgcaatggcacaatctcaactcactgcaacctccaccccctgagttcnagcaattctcctgccttggcctcccgagtagctgggattacaggcccctgccaccatgcctggctaatttttgtatttttagtaaagacggagtttcancattttggccaggctgattttgaactgctgacctcaggtgatccacctgcctnancctcccaaaatgctgggattacaggcatganccactgcncccanccganagttttaaanaaggggaaagctnttcccttttcctaacctaacctggccttgattntgttaataccaancctgtgtgaattggagtggaaagcaaaatgctga

SEQ ID NO: 3494 - DNA, 411 bp, Homo sapiens
  misc_feature 294: n = A,T,C or G
acgccaacgccgccgacatcgactatatagcaggcaccaacaacatggacggccacatcttcgccagcatcgacatgcctgccatcaacaagggcaacaagaaagtcacggaggaggacttctacaagctggtcagtgagttcacaatcaccaaggggctcagaggcgccaagacgacctttgatgtctacaccgagtcctgggcccaggacccatcccaggagaataagaagaagactgtggtggactttgagaccgatgtcctcttcctggtgcccaccgagattgccctancccagcacagagccaatgccaagagtgccaagacctacgcctacctgttttcccatccctctcggatgcccgtctaccccaaatgggtgggggccgaccatgcagatgacattcagt

SEQ ID NO: 3495 - DNA, 544 bp, Homo sapiens
actgggctgttcagggacagaatgtgctacacggataccccaaggacatctacagctcctttggcttccctagaactgtgaagcatatcgatgctgctctttctgaggaaaacactggaaaaacctacttctttgttgccaacaaatactggaggtatgatgaatataaacgatctatggatccaggttatcccaaaatgatagcacatgactttcctggaattggccacaaagttgatgcagttttcatgaaagatggatttttctatttctttcatggaacaagacaatacaaatttgatcctaaaacgaagagaattttgactctccagaaagctaatagctggttcaactgcaggaaaaattgaacattactaatttgaatggaaaacacatggtgtgagtccaaagaaggtgttttcctgaagaactgtctattttctcagtcatttttaacctctagagtcactgatacacagaatataatcttatttatacctcagtttgcatatttttttactatttagaatgtagccctttttgt

SEQ ID NO: 3496 - DNA, 487 bp, Homo sapiens
cggaactgccacgatgctgccactttggactctttcactgctgctgggagcagtagcaggaaaagaagtttgctacgaaagactcggctgcttcagtgatgactccccatggtcaggaattacggaaagacccctccatatattgccttggtctccaaaagatgtcaacacccgcttcctcctatatactaatgagaacccaaacaactttcaagaagttgccgcagattcatcaagcatcagtggctccaatttcaaaacaaatagaaaaactcgctttattattcatggattcatagacaagggagaagaaaactggctggccaatgtgtgcaagaatctgttcaaggtggaaagtgtgaactgtatctgtgtggactggaaaggtggctcccgaactggatacacacaagcctcgcagaacatcaggatcgtgggagcagaagtggcatattttgttgaatttcttcagtcggcgttcggttac

SEQ ID NO: 3497 - DNA, 576 bp, Homo sapiens
  misc_feature 546: n = A,T,C or G
actaggagaatagatcttaattgttctcactatcaccaccacaacaaaaaaggtaagtaggtgacaagattgataatgttagttggcttgactctagtaatcagttcactatgtatttgtatatcaagacatcatattatataccttaaacataaacaatttttattaaaaaattgaaagtaaaataaaataaatagcatttgccatgcttatttttccacaaaggcttttttcttttaacacctaattaaaatcctgtgaaactcatttggaaacccctggcatagtggttttgagcaaagttaaagagatcttgttttaaattctattcctgccacttaataactgtgtgtccctgggtaagttgttacaattttatgaatcttggtttccttgtctgtcaaatggcagagtaatacctacttcatctagttgttaccggggtttaaggagataataaatgtaaaatgtttaaacactgtggctggcatataggattaacttttcagaataagcagcactcttagtttttttagtctaactttnagtgtaacataatgctattataaccatttt

SEQ ID NO: 3498 - DNA, 259 bp, Homo sapiens
acgggttgtccagcagaaatttacagctgtccagcttcttggcctggtcatagcagttgtcatgtgtctggcagcacttgtccagttcatccacgggggtgcctgagccccccaagccacagtagcagccgtagttgttgtattccaagaaggggtcactccccgggatcacgcacttgatcattttgcggaactgccacacggcccgagggctgatgccgctgtcggcggcggccactgtgagcagcacagctagcac

SEQ ID NO: 3499 - DNA, 207 bp, Homo sapiens
acactcaaactttatttggttgcctggatggggccagagaggaggacaagaagggtgtcaaagggtcagcccagtagggatgattcagggtgtgctccatgatggtcagaagcgccagccacgtctccttggctgtggggatgatctgggaggctggcagcaggaagccatagcgcccagtgtcccggagctcgaaggtgaaggagt

SEQ ID NO: 3500 - DNA, 522 bp, Homo sapiens
acacaattccaggacttgcctcttcaatggtattcctggacctctcctgggccaaagggaagcccactgccctgaaaggtgagtcccaagtcaggcatcattcatcacaaacagacataggagcccttggacctaaagggaacattgacagtggtctggcaatactccccatgggcctgtgatggtgatgaccacagagtgaggcttctttacatttggaaaggggaggggagactggaacgactgcattttgtgccctcactgacagctcagccacaatacaatagaacaccagcaagacttctaaggttttggactcttcttcctgactccaagatggcactcttggacccacatggggcctgggagcactcactgctctgaagggaagggtgcaggcctaactttccacctgctgattttagagtcccagggccttgagtaaatataggcagtagccagggagtggttactgcaggcgttggaaaacatgcagtgctgtgctggcttcaggtctgaccc

SEQ ID NO: 3501 - DNA, 495 bp, Homo sapiens
  misc_feature 160, 410, 418, 442: n = A,T,C or G
acaggaaagaacttccttaccctaaaacaaggtatttccccactatggcttagatctgcatttctgagatggttcagtggctgggggatgttaattctgatgcctcaaaagaaaactgtattggtcaaataaatttggaaaaagcatatgaaagccttanaaacgttctaaagaaaacctgttttatgtttattttaaccaaacatttccaagtcctaagatccttttcttactgataatcaagattaccatttgaagagcacctgtcactacagtaggacaagaaaaatggtcccagttaattgaaagctttgaaagctgtatgatttgtcagttgtgggattggaaaaaggcccaaagcagacatgactagtactattcatacctaactggcttttaaatagcattgntgtagctngagaaattaataaagttgtcaganattaagtccatcttctaacattcacatacgcattccaatttgcactaaatgta

SEQ ID NO: 3502 - DNA, 215 bp, Homo sapiens
  misc_feature 30, 36, 58, 94, 190: n = A,T,C or G
cttttttttttttttttttttttttttttnggaggnaaaacaggatgtaaagtttatntacaaaaatataatgtttatctgaaatatttacagngttggttaaagcaatatttttacaacttttaaaggtaaactactatgtatattacaggtaagctacaatgggtttaatttgcaaaagttaagtaanaaatgttttaaacaaggcttaaagt

SEQ ID NO: 3503 - DNA, 213 bp, Homo sapiens; identical to SEQ ID NO: 3148

SEQ ID NO: 3504 - DNA, 526 bp, Homo sapiens
  misc_feature 498, 510: n = A,T,C or G
acagtaaatttgtcccacaggattttaaagcctacgtcttgtatataatacaatgcaggcctacaaaaatggtgcagccatatttacaaatttagttcacagactgctgcagtaaaatggctggaaagttttgttttgcttgtttcacaatttctctaaacagcagcagaatcttaaaatacctggctggcatctcttttctttgtaacaaataattcactttagtatactctgtgtatatacaaagtttttgtatgttttataaaaattcacagaactgcaaggttcagtcatcttttttacaccagagaaccacaggtcaagagtcatctcttcaagcagagtttgagggagctgcgtcaggccaatggtgtctttatttattaatactcgcatgtggcccttggaattccttagctgtatgattaaagacttgtaaccagctgcatttgtccttctctaacatctccttctggaatacacccttctttgttaatnggggattatatnaccatcactattgccc

SEQ ID NO: 3505 - DNA, 460 bp, Homo sapiens
  misc_feature 400: n = A,T,C or G
acaatttaatttttctgcttgcccaagaaacaaagcttctgtggaaccatggaagaagatgaaaatgagactggcaaagaacaaatgctgaatctgaagaagatttgggcaaataatctgcatacttttaattgggaataagatggaaaatatgaatgctaaatcaaattttttaaaaaatacaccacacgatacaactcaatacaggagtatttcttctcaaattcttctagcaccatcaacattcttcaagtatctgaaatactattaattagcacctttgtattatgaacaaaacaaaacaaggacctcagttcatctctgtctaggtcagcacctaacaatgtggatcacactcatgggaaagtgttttgaggtagtttaaacctttggaagtttngggttttaaacttccctctgtggaagatattcaaaagccacaagtggtgcaaatgtttat

SEQ ID NO: 3506 - DNA, 417 bp, Homo sapiens
acatggaaaggagtatggtgagctatttcctttttaaaggatgagaccttcataaattggcccctcggattctggtgattcccgccgcaagcgcaaatgctccagtgtgttatgaaaatgtttgttaatctgctctgtttcttcactggattcaagattcgggaggtcttctcgaatcttttggataagctggtttaaaacctgaattgttaccgcatcattttccttttcataaaaatagatatatctgttcagaatttctataaaaagctgcacttgtagagaggggtccatgcactgatttgctatttttagagctttttttaggcactccattaccctcttgcctccgcgaagctcctccccatttttgtccgtgtttctgccagaccagaagagatgtgcacaggtgctcac

SEQ ID NO: 3507 - DNA, 314 bp, Homo sapiens
acccataggggaacatcaacagctgggaatagctgtggagggtaatgaaggccttgacttttccatgactcttgatgaagtccactatggatttcacttcaacttcagagttggcactgggtccgtggtatgaatcagagcaagggttgctgctggccccaggtcctccaaaacctgcatcccagttccggttaggatccacaccaacacagaggcttccagataccttggaccgggtcttccgccacatacgatttttggtttgagagaacacgtatccatcagggtttgtgactggcaggaggaagatatcc

SEQ ID NO: 3508 - DNA, 213 bp, Homo sapiens
acacatatggcccgggagctacaacaatctatcctgctgctgggggctctaacgactgggcttatgaccaaggaatcagatattccttcacctttgaacttcgagatacaggcagatatggctttctccttccagaatcccagatccgggctacctgcgaggagaccttcctggcaatcaagtatgttgccagctacgtcctggaacacctgt

SEQ ID NO: 3509 - DNA, 197 bp, Homo sapiens
caatgttggcactcttggttctggtgactgtggccctggcatctgctcatcatggtggtgagcactttgaaggcgagaaggtgttccgtgttaacgttgaagatgaaaatcacattaacataatccgcgagttggccagcacgacccagattggcttctggaagccagattctgtcacacaaatcaaacctcacagt

SEQ ID NO: 3510 - DNA, 207 bp, Homo sapiens
acactcaaactttatttggttacctggatggggccagagaggaggacaagaagggtgtcaaagggtcagctcagtaggggtgattcagggtgtgctccatgatggtcagaagcgccagccacgtctccttggctgtggggatgatctgggaggctggcagcaggaagccatagcgcccagtgtcccggagctcgaaggtgaaggagt

SEQ ID NO: 3511 - DNA, 460 bp, Homo sapiens
cggaactgccacgatgctgccactttggactctttcactgctgctgggagcagtagcaggaaaagaagtttgctacgaaagactcggctgcttcagtgatgactccccatggtcaggaattacggaaagacccctccatatattgccttggtctccaaaagatgtcaacacccgcttcctcctatatactaatgagaacccaaacaactttcaagaagttgccgcagattcatcaagcatcagtggctccaatttcaaaacaaatagaaaaactcgctttattattcatggattcatagacaagggagaagaaaactggctggccaatgtgtgcaagaatctgttcaaggtggaaagtgtgaactgtatctgtgtggactggaaaggtggctcccgaactggatacacacaagcctcgcagaacatcaggatcgtgggagcagaagtggcatattttgtt

SEQ ID NO: 3512 - DNA, 531 bp, Homo sapiens
  misc_feature 481, 484, 523: n = A,T,C or G
gagaaccaatgggaccattggacgcatcacagggttggacccagcagaaccttgctttcagggcacacctgaattagtccgattggaccccagcgatgccaaatttgtggatgtaattcacacggatggtgcccccatagtccccaatttggggtttggaatgagccaagtcgtgggccacctagatttctttccaaatggaggagtggaaatgcctggatgtaaaaagaacattctctctcagattgtggacatagacggaatctgggaagggactcgagactttgcggcctgtaatcacttaagaagctacaaatattacactgatagcatcgtcaaccctgatggctttgctggattcccctgtgcctcttacaacgtcttcactgcaaacaagtgtttcccttgtccaagtggaggctgcccacagatgggtcactatgctgatagatatcctgggaaaacaaatgatgtgggccanaanttttatctagacactggtgatgccagtaattttgcacgntggaggta

SEQ ID NO: 3513 - DNA, 389 bp, Homo sapiens
  misc_feature 260, 354: n = A,T,C or G
acaggaaagaacttccttaccctaaaacaaggtatttccccactatggcttagatctgcatttctgagatggttcagtggctgggggatgttaattctgatgcctcaaaagaaaactgtattggtcaaataaatttggaaaaagcatatgaaagccttagaaacgttctaaagaaaacctgttttatgtttattttaaccaaacatttccaagtcctaagatccttttcttactgataatcaagattaccatttgaagancacctgtcactacagtaggacaagaaaaatggtcccagttaattgaaagctttgaaagctgtatgatttgtcagttgtgggattggaaaaaggnccaaagcagacatgactagtactattcatacctaa

SEQ ID NO: 3514 - DNA, 409 bp, Homo sapiens
  misc_feature 245, 395: n = A,T,C or G
acctgtggaagttacttcaaccctggaagtagggactttccagcagtcccatattctggatgggatttcaatgatggtaaatgtaaaactggaagtggagatatcgagaactacaatgatgctactcaggtcagagattgtcgtctgactggtcttcttgatcttgcactggagaaggattacgtgcgttctaagattgccgaatatatgaaccatctcattgacattggtgttgcagggttcanacttgatgcttccaagcacatgtggcctggagacataaaggcaattttggacaaactgcataatctaaacagtaactggttccctgcaggaagtaaacctttcatttaccaggaggtaattgatctgggtggtgagccaattaaaaagcngtgactactttggt

SEQ ID NO: 3515 - DNA, 252 bp, Homo sapiens
actcattccaatgaatttgactcagatgtggatgttggggacttgcagatggttaaatttatttggtataacaatgtgatcaacccaactttacctagagtgggagcatccaagattatagtggagacaaatgttggaaaacagttcaacttctgtagtccagaaaccgtcagggaggaagttctgctcaccctcacaccgtgttaggagactactgttatttgaccaatgaattgacttctaataaaatct

SEQ ID NO: 3516 - DNA, 442 bp, Homo sapiens
aatttcaaaacaaatagaaaaactcgctttattattcatggattcatagacaagggagaagaaaactggctggccaatgtgtgcaagaatctgttcaaggtggaaagtgtgaactgtatctgtgtggactggaaaggtggctcccgaactggatacacacaagcctcgcagaacatcaggatcgtgggagcagaagtggcatattttgttgaatttcttcagtcggcgttcggttactcaccttccaacgtgcatgtcattggccacagcctgggtgcccacgctgctggggaggctggaaggagaaccaatgggaccattggacgcatcacagggttggacccagcagaaccttgctttcagggcacacctgaattagtccgattggaccccagcgatgccaaatttgtggatgtaattcacacggatggtgcccccatag

SEQ ID NO: 3517 - DNA, 534 bp, Homo sapiens
  misc_feature 474: n = A,T,C or G
actgaagatcagcgatgcaaactcattagggaggagatggtctgaactgagttggagacatagtctagtttaatttttgacttcatagtaattgcaggaccagttctagacatccatttttcagcttcctctagtttttgaacttgcaaacaaaggagaacttcttctcacaagattcatccttccatttcttgaatcctgagcatgaagtcaggcttgcacagtagccagcattagcactgctcggggatccagtgtcccaggacttgtaggagaccagggacccactactccagtgccagcggcggttcttttttgggtcatggaggccaatccagacattgctgtcatcagtgctactctccttaatcagtgaggccacgaaggcaccctccgcctgggtgagcacagacaccaggttgcctgaattcatgttctggcaatagagatctgcatcaacccaggtctcagggntcttcattaaagtagtagcagtaggagcgataggcattggtgccttctgggcagctgatt

SEQ ID NO: 3518 - DNA, 244 bp, Homo sapiens
  misc_feature 158, 202, 236: n = A,T,C or G
ttccaatgaatttgactcagatgtggatgttggggacttgcagatggttaaatttatttggtataacaatgtgatcaacccaactttacctagagtgggagcatccaagattatagtggagacaaatgttggaaaacagttcaacttctgtagtccanaaaccgtcagggaggaagttctgctcaccctcacaccgtgttangagactactgttatttgaccaatgaattgacttntaataaaa

SEQ ID NO: 3519 - DNA, 247 bp, Homo sapiens
gaactgccacgatgctgccactttggactctttcactgctgctgggagcagtagcaggaaaagaagtttgctacgaaagactcggctgcttcagtgatgactccccatggtcaggaattacggaaagacccctccatatattgccttggtctccaaaagatgtcaacacccgcttcctcctatatactaatgagaacccaaacaactttcaagaagttgccgcagattcatcaagcatcagtggctc

SEQ ID NO: 3520 - DNA, 405 bp, Homo sapiens
acagccctcctgcggcgtgggagggctgcgtggggtggaaggccagacacaggacagcgctggggacctccaccacggccgacggttgctggggacgcaggtctcgccggtccaggttccaggcacacacgaaggacttaagcgtgctccagtccccatggtccagccggccgtaggcacaggccaccacagagccagtggagttccaggagatgctggtcacatgcagaccctgcgcttgggctggcgggtagcccagggtatacagacaagacaccatctgctgctgctcggtccagttcacctcgaagccatcaaacgcgtggctctgccaattcttgttcagctctcggatgaccatggcctccactctccgaagaaaggctgcgagcctgggtatgtcgt

SEQ ID NO: 3521 - DNA, 331 bp, Homo sapiens
acctatggacgtgagattcaagtgacagagcttctcgacaagttagacttttatgtcctgcctgtgctcaatattgatggctacatctacacctggaccaagagccgattttggagaaagactcgctccacccatactggatctagctgcattggcacagaccccaacagaaattttgatgctggttggtgtgaaattggagcctctcgaaacccctgtgatgaaacttactgtggacctgccgcagagcctgaaaaggagaccaaggccctggctgatttcatccgcaacaaactctcttccatcaaggcatatctgacaatccactcgt

SEQ ID NO: 3522 - DNA, 566 bp, Homo sapiens
acactgacttacgcccttcccacagctacagataagggctcgcaaagttggcctcagagacacatcaggaaccaaggtggaccagcaggtgccgagcctgtgtatctgcttggaggagacgttccaatgtgctgccttgttcagagatggtgtagttgcaagaaacagaaacccaccacaatttctcaggcaaaaagggagttaattataaggacataagagcacaaagttccagtgcaagagatacatccaggctgcacaagctccgggagtggggcctggcaagccaaaagaaaccaaagtttgtcttgccttctgttcctctttctgaagccacatagccttttatgactgtgtatctttgcatcgcttttgttttctttttatgtctctgaagccagcttttcctgttcactcatcccttgattaaatatggacattctagcttcacatcacttcctaattcagggaccaacagagactggttagcatgttgctatcccacctccaaattgcatcagggaatttgattttgctgcttgggtcagggtccactagtctgggcc

SEQ ID NO: 3523 - DNA, 260 bp, Homo sapiens
gatgctccggctgctcagttccctcctccttgtggccgttgcctcaggctatggcccaccttcctctcactcttccagccgcgttgtccatggtgaggatgcggtcccctacagctggccctggcaggtttccctgcagtatgagaaaagtggaagcttctaccacacgtgtggcggtagcctcatcgcccccgattgggttgtgactgccggccactgcatctcgagggatctgacctaccaggtggtgttgggcgagt

SEQ ID NO: 3524 - DNA, 270 bp, Homo sapiens
acttggtgccgtgcagtgaggcaagttctttcacagtagctttagccagggcattcaactcagcattgttctcaccgagtttgtaagcatatgagtaagggtagatcatcatttgggagtacgagtggattgtcagatatgccttcacctttgaacttcgagatacaggcagatatggctttctccttccagaatcccagatccgggctacctgcgaggagaccttcctggcaatcaagtatgttgccagctacgtcctggaacacctgt

SEQ ID NO: 3525 - DNA, 527 bp, Homo sapiens
  misc_feature 511: n = A,T,C or G
acaaaaagggctacattctaaatagtaaaaaaatatgcaaactgaggtataaataagattatattctgtgtatcagtgactctagaggttaaaaatgactgagaaaatagacagttcttcaggaaaacaccttctttggactcacaccatgtgttttccattcaaattagtaatgttcaattttccctgcagttgaaccagctattagctttctggagagtcaaaattctcttcgttttaggatcaaatttgtattgtcttgttccatgaaagaaatagaaaaatccatctttcatgaaaactgcatcaactttgtggccaattccaggaaagtcatgtgctatcattttgggataacctggatccatagatcgtttatattcatcatacctccagtatttgttagcaacaaagaagtaggtttttccagtgttttcctcagaaagagcagcatcgatatgcttcacagttctagggaagccaaaggagctgtagatgtccttggggtatncgtgtagcacattctg

SEQ ID NO: 3526 - DNA, 135 bp, Homo sapiens
ggacgctgctgctgtccactttggtggctggagccctcagttgtggggaccccacttacccaccttatgtgactagggtggttggcggtgaagaagcgaggcccaacagctggccctggcaggtctccctgcagt

SEQ ID NO: 3527 - DNA, 331 bp, Homo sapiens; identical to SEQ ID NO: 2994

SEQ ID NO: 3528 - DNA, 331 bp, Homo sapiens
  misc_feature 247: n = A,T,C or G
acctatggacgtgagatccaagtgacagagcttctcgacaagttagacttttatgtcctgcctgtgctcaatattgatggctacatctacacctggaccaagagccgattttggagaaagactcgctccacccatactggatctagctgcattggcacagaccccaacagaaattttgatgctggttggtgtgaaattggagcctctcgaaacccctgtgatgaaacttactgtggacctgccgcanagtctgaaaaggagaccaaggccctggctgatttcatccgcaacaaactctcttccatcaaggcatatctgacaatccactcgt

SEQ ID NO: 3529 - DNA, 316 bp, Homo sapiens
accatacagaaactctttgaggaaagcacacatctttggaattacattttccttcacccaggcaatgatgtatttttcctatgctggatgtttccggtttggagcctacttggtggcacataaactcatgagctttgaggatgttctgttagtattttcagctgttgtctttggtgccatggccgtggggcaagtcagctcatttgctcctgactatgccaaagccaaaatatcagcagcccacatcatcatgatcattgaaaaaacccctttgattgacagctacagcacggaaggcctatgccgaacacattgg

SEQ ID NO: 3530 - DNA, 465 bp, Homo sapiens
acagaaggtgaaggagctggaggacctggagcacctgcagctggacttctggcggggccctgcccaccctggctcccccatcgacgtccgagtgcccttccccagcatccaggcggtcaagatctttctggagtcccacggcatcagctatgagaccatgatcgaggacgtgcagtcgctgctggacgaggagcaggagcagatgttcgccttccggtcccgggcgcgctccaccgacacttttaactacgccacctaccacaccctggaggagatctatgacttcctggacctgctggtggcggagaacccgcaccttgtcagcaagatccagattggcaacacctatgaagggcgtcccatttacgtgctgaagttcagcacggggggcagtaagcgtccagccatctggatcgacacgggcatccattcccgggagtgggtcacccaggccagtggggtctg

SEQ ID NO: 3531 - DNA, 368 bp, Homo sapiens
accttcaggtgttagagtgtgagcgtaaccaacacctggtccagacctcatggaattacatgaacgacagccttcgcaccgacgtcttcgtgcggttccagccagagagcatcgcctgtgcctgcatttatcttgctgcccggacgctggagatccctttgcccaatcgtccccattggtttcttttgtttggagcaactgaagaagaaattcaggaaatctgcttaaagatcttgcagctttatgctcggaaaaaggttgatctcacacacctggagggtgaagtggaaaaaagaaagcgcgctatcgaagaggcaaaggcccaagcccggggcctgttgcctgggggcacacaggtgctggatggt

SEQ ID NO: 3532 - DNA, 304 bp, Homo sapiens
ctttgctggattcccctgtgcctcttacaacgtcttcactgcaaacaagtgtttcccttgtccaagtggaggctgcccacagatgggtcactatgctgatagatatcctgggaaaacaaatgatgtgggccagaaattttatctagacactggtgatgccagtaattttgcacgttggaggtataaggtatctgtcacactgtctggaaaaaaggttacaggacacatactagtttctttgttcggaaataaaggaaactctaagcagtatgaaattttcaagggcactctcaaaccagatagt

SEQ ID NO: 3533 - DNA, 381 bp, Homo sapiens
gggactcgagactttgcggcctgtaatcacttaagaagctacaaatattacactgatagcatcgtcaaccctgatggctttgctggattcccctgtgcctcttacaacgtcttcactgcaaacaagtgtttcccttgtccaagtggaggctgcccacagatgggtcactatgctgatagatatcctgggaaaacaaatgatgtgggccagaaattttatctagacactggtgatgccagtaattttgcacgttggaggtataaggtatctgtcacactgtctggaaaaaaggttacaggacacatactagtttctttgttcggaaataaaggaaactctaagcagtatgaaattttcaagggcactctcaaaccagatagt

SEQ ID NO: 3534 - DNA, 596 bp, Homo sapiens
  misc_feature 561, 562: n = A,T,C or G
accaagcaatgaagaacaaattaaaaatctgctacaattggaggctcaagaacatctccagcttgatttttggaaatcacccaccaccccaggggagacagcccacgtccgagttcccttcgtcaacgtccaggcagtcaaagtgttcttggagtcccagggaattgcctattccatcatgattgaagacgtgcaggtcctgttggacaaagagaatgaagaaatgctttttaataggagaagagaacggagtggtaacttcaattttggggcctaccataccctggaagagatttcccaagaaatggataacctcgtggctgagcaccctggtctagtgagcaaagtgaatattggctcttcttttgagaaccggcctatgaacgtgctcaagttcagcaccggaggagacaagccagctatctggctggatgctgggatccatgctcgagagtgggttacacaagctacggcactttggacagcaaataagattgtttctgattatggaaaggacccatccatcacttccattctggatgccctggatatcttccttcnngccagtcacaaaccctgatggatacgtgttctct

SEQ ID NO: 3535 - DNA, 258 bp, Homo sapiens
tgctccggctgctcagttccctcctccttgtggccgttgcctcaggctatggcccaccttcctctcactcttccagccgcgttgtccatggtgaggatgcggtcccctacagctggccctggcaggtttccctgcagtatgagaaaagtggaagcttctaccacacgtgtggcggtagcctcatcgcccccgattgggttgtgactgccggccactgcatctcgagggatctgacctaccaggtggtgttgggtgagt

SEQ ID NO: 3536 - DNA, 190 bp, Homo sapiens; identical to SEQ ID NO: 3450

SEQ ID NO: 3537 - DNA, 314 bp, Homo sapiens
  misc_feature 264: n = A,T,C or G
actcattccaatgaatttgactcagatgtggatgttggggacttgcagatggttaaatttatttggtataacaatgtgatcaacccaactttacctagagtgggagcatccaagattatagtggagacaaatgttggaaaacagttcaacttctgtagtccagaaaccgtcagggaggaagttctgctcaccctcacaccgtgttaggagactactgttatttgaccaatgaattgacttctaataaaatctagtggtgatgcnaaaaaaaaaaaaaaaaaaaaaaaaaaaaagcttgtaaaaaaaaagcttgt

SEQ ID NO: 3538 - DNA, 476 bp, Homo sapiens
  misc_feature 311: n = A,T,C or G
cggaactgccacgatgctgccactttggactctttcactgctgctgggagcagtagcaggaaaagaagtttgctacgaaagactcggctgcttcagtgatgactccccatggtcaggaattacggaaagacccctccatatattgccttggtctccaaaagatgtcaacacccgcttcctcctatatactaatgagaacccaaacaactttcaagaagttgccgcagattcatcaagcatcagtggctccaatttcaaaacaaatagaaaaactcgctttattattcatggattcatagacaagggagaanaaaactggctggccaatgtgtgcaagaatctgttcaaggtggaaagtgtgaactgtatctgtgtggactggaaaggtggctcccgaactggatacacacaagcctcgcagaacatcaggatcgtgggagcagaagtggcatattttgttgaatttcttcagtcgg

SEQ ID NO: 3539 - DNA, 438 bp, Homo sapiens
  misc_feature 428: n = A,T,C or G
acttgatgccctggctgtaggtccagtcaatagtgcttccactggcttgataaattgccttgatgatgctgccatagttgaacttggtcccgtagagagaggccagggctgtcacagcagccttggaaagctgatccagctcatcctggtcagggactggttctgttttgtagccatagggatacatgaggagctgggagtagctgtggatggagatgaaggccttgatgttcccatggtccttcacaaagtctacaatggacttgacctccacttcggaattggcaaacttgccgtggtaagtctccgagcaggggttactgctggcttcggacaacccaaagccagcgtcccagttcctgttggggtccccgcccatacagagggagcctgctgtgtgggaccgagtcttgcgccacatgcgattngtgctgtgcg

SEQ ID NO: 3540 - DNA, 297 bp, Homo sapiens
  misc_feature 264, 275: n = A,T,C or G
actcattccaatgaatttgactcagatgtggatgttggggacttgcagatggttaaatttatttggtataacaatgtgatcaacccaactttacctagagtgggagcatccaagattatagtggagacaaatgttggaaaacagttcaacttctgtagtccagaaaccgtcagggaggaagttctgctcaccctcacaccgcgttaggagactactgttatttgaccaatgaattgacttctaataaaatctagtggtgatgtnaaaaaaaaaanaaaaaaaaaaaaaaaagcttgt

SEQ ID NO: 3541 - DNA, 207 bp, Homo sapiens; identical to SEQ ID NO: 2996

SEQ ID NO: 3542 - DNA, 96 bp, Homo sapiens
  misc_feature 62: n = A,T,C or G
acatacggggtttcatcatgttggccaggctggtctccaactcctgacctcaagtgatccgnccacttcagcctcccaaagtgctgggattacagg

SEQ ID NO: 3543 - DNA, 549 bp, Homo sapiens
ggaactgccacgatgctgccactttggactctttcactgctgctgggagcagtagcaggaaaagaagtttgctacgaaagactcggctgcttcagtgatgactccccatggtcaggaattacggaaagacccctccatatattgccttggtctccaaaagatgtcaacacccgcttcctcctatatactaatgagaacccaaacaactttcaagaagttgccgcagattcatcaagcatcagtggctccaatttcaaaacaaatagaaaaactcgctttattattcatggattcatagacaagggagaagaaaactggctggccaatgtgtgcaagaatctgttcaaggtggaaagtgtgaactgtatctgtgtggactggaaaggtggctcccgaactggatacacacaagcctcgcagaacatcaggatcgtgggagcagaagtggcatattttgttgaatttcttcagtcggcgttcggttactcaccttccaacgtgcatgtcattggccacagcctgggtgcccacgctgctggggaggctgga

SEQ ID NO: 3544 - DNA, 498 bp, Homo sapiens
accggttggaaggcactccctggtgtaatctgagatactgcacagacccatccactgtggaggacaagtgtgagaaggcctgccgccccgaggaggagtgccttgccctcaacagcacctggggctgtttctgcagacaggacctcaatagttctgatgtccacagtttgcagcctcagctagactgtgggcccagggagatcaaggtgaaggtggacaaatgtttgctgggaggcctgggtttgggggaggaggtcattgcctacctgcgagacccaaactgcagcagcatcttgcagacagaggagaggaactgggtatctgtgaccagccccgtccaggctagtgcctgcaggaacattctggagagaaatcaaacccatgccatctacaaaaacaccctccccttggtcaatgatttcatcatcagagacaccaccctcaacatcaacttccaatgtgcctacccactggacatgaaagtcagcctccaagctg

SEQ ID NO: 3545 - DNA, 524 bp, Homo sapiens
  misc_feature 243: n = A,T,C or G
ccaacgtgcatgtcattggccacagcctgggtgcccacgctgctggggaggctggaaggagaaccaatgggaccattggacgcatcacagggttggacccagcagaaccttgctttcagggcacacctgaattagtccgattggaccccagcgatgccaaatttgtggatgtaattcacacggatggtgcccccatagtccccaatttggggtttggaatgagccaagtcgtgggccacctanatttctttccaaatggaggagtggaaatgcctggatgtaaaaagaacattctctctcagattgtggacatagacggaatctgggaagggactcgagactttgcggcctgtaatcacttaagaagctacaaatattacactgatagcatcgtcaaccctgatggctttgctggattcccctgtgcctcttacaacgtcttcactgcaaacaagtgtttcccttgtccaagtggaggctgcccacagatgggtcactatgctgatagatatcctgggaaaaca

SEQ ID NO: 3546 - DNA, 285 bp, Homo sapiens
actatctggtttgagagtgcccttgaaaatttcatactgcttagagtttcctttatttccgaacaaagaaactagtatgtgtcctgtaaccttttttccagacagtgtgacagataccttatacctccaacgtgcaaaattactggcatcaccagtgtctagataaaatttctggcccacatcatttgttttcccaggatatctatcagcatagtgacccatctgtgggcagcctccacttggacaagggaaacacttgtttgcagtgaagacgttgtaagaggc

SEQ ID NO: 3547 - DNA, 501 bp, Homo sapiens
  misc_feature 458: n = A,T,C or G
acccactgtatttatttatgtgcaacaagaagtgtcagcaactgcacaaactcctccctgttcagctagtaggcagcaattctgttatctggcatcccatagctgggttaaattaaaacagggcgtgagaacaggtgagtctagaggtctaactctaacagggaccaccgtgcatttgaataaacagttgtattagggatgttgttaaagttagccactgggcagaataaaggatcccttaggtcaaatatttgggtttgacatgatgacatgacacatccaacactctgtcaaattacctgcacaaggcgctgattgtgaaattctagttacagcattatcttaccaaattaaagaggcaggcatgagcagggaaaaatggagtgggataagagcctcgtcacgatgaggcttgggacatcttgggaaaaactgtccacagcatgaagtcatcaacntcttgtcctggttggcaatttgagtgtctctagttatggtgtt

SEQ ID NO: 3548 - DNA, 464 bp, Homo sapiens
atcaagcatcagtggctccaatttcaaaacaaatagaaaaactcgctttattattcatggattcatagacaagggagaagaaaactggctggccaatgtgtgcaagaatctgttcaaggtggaaagtgtgaactgtatctgtgtggactggaaaggtggctcccgaactggatacacacaagcctcgcagaacatcaggatcgtgggagcagaagtggcatattttgttgaatttcttcagtcggcgttcggttactcaccttccaacgtgcatgtcattggccacagcctgggtgcccacgctgctggggaggctggaaggagaaccaatgggaccattggacgcatcacagggttggacccagcagaaccttgctttcagggcacacctgaattagtccgattggaccccagcgatgccaaatttgtggatgtaattcacacggatggtgcccccatagtcc

SEQ ID NO: 3549 - DNA, 495 bp, Homo sapiens
  misc_feature 302, 396: n = A,T,C or G
gcagctttcaccgccattctcgacaccttggacatcttcctggagatcgtcaccaaccctgatggctttgccttcacgcacagcacgaatcgcatgtggcgcaagactcggtcccacacagcaggctccctctgtattggcgtggaccccaacaggaactgggacgctggctttgggttgtccggagccagcagtaacccctgctcggagacttaccacggcaagtttgccaattccgaagtggaggtcaagtccattgtagactttgtgaaggaccatgggaacatcaaggccttcatctncatccacagctactcccagctcctcatgtatccctatggctacaaaacagaaccagtccctgaccaggatgagctggatcagctttccaaggcngctgtgacagccctggcctctctctacgggaccaagttcaactatggcagcatcatcaaggcaatttatcaagccagtggaagcactattgactggacc

SEQ ID NO: 3550 - DNA, 479 bp, Homo sapiens
acagctgcacccaaggttaaaaagaggtagcagggaaaacaaacttaaactctttgtatatggtgaaacccatccctctcctgccctctaatggtatgtttacattatttcgttattatacaatgtagtggtataaacagtattattaaactgaaggcataagttaaaggaagtatgttactttgagctgatgtaggctcttccacttttatctgcattttacttatttggggactttgtattgctagggcttcagaatactaactttgacacagctcccagagaggtttgcaaacttttggtttccctctcaaatccatggtagtagtttcaaatgagtttgtggataatggatgtttagtccttatcatttgctgtgttttgacagtttttaatttgcagtattcactcacgaactgttttattttaggaataattgcaaaaccaaccttcgtccggtgatgagaatagccgtatga

SEQ ID NO: 3551 - DNA, 472 bp, Homo sapiens
  misc_feature 464: n = A,T,C or G
actatctggtttgagagtgcccttgaaaatttcatactgcttagagtttcctttatttccgaacaaagaaactagtatgtgtcctgtaaccttttttccagacagtgtgacagataccttatacctccaacgtgcaaaattactggcatcaccagtgtctagataaaatttctggcccacatcatttgttttcccaggatatctatcagcatagtgacccatctgtgggcagcctccacttggacaagggaaacacttgtttgcagtgaagacgttgtaagaggcacaggggaatccagcaaagccatcagggttgacgatgctatcagtgtaatatttgtagcttcttaagtgattacaggccgcaaagtctcgagtcccttcccagattccgtctatgtccacaatctgagagagaatgttctttttacatccaggcatttccactcctccatttggaaagnaatctagg

SEQ ID NO: 3552 - DNA, 381 bp, Homo sapiens; identical to SEQ ID NO: 3533

SEQ ID NO: 3553 - DNA, 363 bp, Homo sapiens
acatgtgcacaacgtgcaggtttgttacatatgtatacatgtgccatgctggtgtgctgcacccatcaactcgtcatttacactaggtatatctcctaatgctattcctctcccctccccccaactcaggacaggcccgggtgtgtgatgttccccttcctgtgtccaagtgttctcattgttcaattcccacctatgagtagagaacataagaggcacaaaggtcttttacaattaagtatcagaagacaactgtgcttttttctcacgtgaaatggttacgaacagaaaacaaatctttctaaaagtgttatccaatgctttgtgaaaaaatgattaattaaaatactgtgtctgaaatgt

SEQ ID NO: 3554 - DNA, 381 bp, Homo sapiens
ccggcaccaacaacatggacggccacatcttcgccagcatcgacatgcctgccatcaacaagggcaacaagaaagtcacggaggaggacttctacaagctggtcagtgagttcacaatcaccaaggggctcagaggcgccaagacgacctttgatgtctacaccgagtcctgggcccaggacccatcccaggagaataagaagaagactgtggtggactttgagaccgatgtcctcttcctggtgcccaccgagattgccctagcccagcacagagccaatgccaagagtgccaagacctacgcctacctgttttcccatccctctcggatgcccgtctaccccaaatgggtgggggccgaccatgcagatgacattcagt

SEQ ID NO: 3555 - DNA, 227 bp, Homo sapiens
  misc_feature 47, 103, 165, 187, 197: n = A,T,C or G
acaagctttttttttttttttttttttttggaattttctgagagatntttattctttattcaggatgtgggatcgatcagcactgccagctgggccttggttntagtggcttgctatggtctcctcaatccagtcgatgaaggcggagactcgagtgaacaccgngggcttcctgcgggggttgcanccaaaggcanaaacaaagctggtcacgccatggacctgcc

SEQ ID NO: 3556 - DNA, 331 bp, Homo sapiens; identical to SEQ ID NO: 3099

SEQ ID NO: 3557 - DNA, 420 bp, Homo sapiens
  misc_feature 211, 335, 404: n = A,T,C or G
acccccgctgttacacaggtgtttagatacgtgttcctgaatgaagctgcttttgaattttgttatgttgaaatgcaagaaataacaatgatggcagcaattaaggtcacagaaatcattaggtaaaggaaaaccaatgaggagttctgcagttttcttttaataagtaaagtgagacttgggtggtgggaagaaggaaggtgggaagaangaattagacactctgcctgccactctgcgtgtgtgtactctcgcgcacgtgctgtctatatggaagccactcccttttctttcctttgaaactggtaaggttaaaataggggagaaatcctacntgttggaatgatagctttttggaaaatttaagaaactctccaggctctccatcttgatttatgcttganttgttatgtgccatat

SEQ ID NO: 3558 - DNA, 358 bp, Homo sapiens
  misc_feature 33, 51, 74, 121, 134, 145, 158, 166, 252, 263, 277, 291,305, 324, 330, 332, 348, 358: n = A,T,C or G
tttttttttttttttttttttttttttttatgnaagatatatctcctactntggctaagctcacacattagtgnggaggaaaagtgatgttttcaaaatcacctttatgcagtgagattcncaatcactatganaatagcatcgngagcttgaataanagcccganaagaagcaaacagcgatttgaatgatttggccactgataatgatggggtatctgtatttctaataacatggaaggatatccttgcncattatggatntggaaataattcanatgatacaacaggngagtaaatggagtntcagcggaacttggcaatntggcananctgaaatggatcaaanctgggattcn

SEQ ID NO: 3559 - DNA, 331 bp, Homo sapiens; identical to SEQ ID NO: 3099

SEQ ID NO: 3560 - DNA, 243 bp, Homo sapiens
  misc_feature 124: n = A,T,C or G
accgccggggcatcttaggagactggtccaacgctatctccgcgctctactgcaggtgcagctgatgcattgctggtctctcatctgcagcttccacagagtgccaagcccctcactcagcccntccctgggctctgctccggggccccaagacccaggaggaggagcgttctgcctgccccctcccacctcccctgcaatacagcctttgtgcagttgtccccgtcaaaaaaaaaaaaaaaa

SEQ ID NO: 3561 - DNA, 331 bp, Homo sapiens
acctatggacgtgagatccaagtgacagagcttctcaacaagttagacttttatgtcctgcctgtgctcaatattgatggctacatctacacctggaccaagagccgattttggagaaagactcgctccacccatactggatctagctgcattggcacagaccccaacagaaattttgatgctggttggtgtgaaattggagcctctcgaaacccctatgatgaaacttactgtggacctgccgcagagtctgaaaaggagaccaaggccctggctgatttcatccgcaacaaactctcttccatcaaggcatatctgacaatccactcgt

SEQ ID NO: 3562 - DNA, 174 bp, Homo sapiens
actagctactctggaggctgaggcaggagaatggcgtgaacccgggaggcagaggttgcagtgagctgagatcacaccactgcactccagcctgggcgacagagagagactccctctcaaaaaacgaaacaatgttcttggctgggcgcagcagctcacacctgtaatcccagt

SEQ ID NO: 3563 - DNA, 111 bp, Homo sapiens
acatcatgagcctcagctcagtgacaaggttcacaatgatgctcagagttttgattatgaccatgatgccttcttgggtgctgaagaagcaaagacctttgatcagctgac

SEQ ID NO: 3564 - DNA, 543 bp, Homo sapiens
gtgaactgtatctgtgtggactggaaaggtggctcccgaactggatacacacaagcctcgcagaacatcaggatcgtgggagcagaagtggcatattttgttgaatttcttcagtcggcgttcggttactcaccttccaacgtgcatgtcattggccacagcctgggtgcccacgctgctggggaggctggaaggagaaccaatgggaccattggacgcatcacagggttggacccagcagaaccttgctttcagggcacacctgaattagtccgattggaccccagcgatgccaaatttgtggatgtaattcacacggatggtgcccccatagtccccaatttggggtttggaatgagccaagtcgtgggccacctagatttctttccaaatggaggagtggaaatgcctggatgtaaaaagaacattctctctcagattgtggacatagacggaatctgggaagggactcgagactttgcggcctgtaatcacttaagaagctacaaatattacactgatagcatcgtcaaccctgatggc

SEQ ID NO: 3565 - DNA, 518 bp, Homo sapiens
acatgaagggccactcggtgtccctcgctgggacaggttgtgtgacctgcccaaggggctccggctcatttgccaaagtcaagacgacgaccaggtcttctgactgctcagcccaaccaataatgaaaaaagtatcagagatgtgtcatatccattttgctaacaagcaattacatgcctttttagtgtttaagagaagccttaattttcctgggatatctccgtaaaatcattctggaatttgattttgaaaattctttaagaaaaaaaaaaaagcttgtcacccccatgagacctgctgtctctcatgtctgcagggacaggccttttagaggcagcaaaagggaatactggtctctggaaagtccagacagaactctagcagctccgatggcttgatctcttccagggagccagtgggctaggcccatgctttggttcaaagcgtttggagaacatcttcttgctccttttccggaaacgagataatggacacagagtcccagacgtcatccttt

SEQ ID NO: 3566 - DNA, 380 bp, Homo sapiens
  misc_feature 326: n = A,T,C or G
ctgcgagctctggcgccgactacccagacgagctgcagtgcctggacgctcctgtgctgagccaggctgagtgtgaagcctcctaccctggaaagattaccaacaacatgttctgtgtgggcttcctcgagggaggcaaggattcctgccagggtgattctggtggccctgtggtctccaatggagagctccaaggaattgtctcctggggctatggctgtgcccagaagaacaggcctggagtctacaccaaggtctacaactatgtggactggattaaggacaccatagctgccaacagctaaagcccctggtccctctgcagnctctataccaataaagtgaccctgctctcaaaaaaaaaaaaaagaaaaaaaaaa

SEQ ID NO: 3567 - DNA, 197 bp, Homo sapiens
actgtgaggtttgatttgtgtgacagaatctggcttccagaagtcaatctgggtcgtgctggccaactcgcggattatgttaatgtgattttcatcttcaacgttaacacggaacaccttctcgccttcaaagtgctcaccaccatgatgagcagatgccagggccacagtcaccagaaccaagagtgccaacattg

SEQ ID NO: 3568 - DNA, 511 bp, Homo sapiens
  misc_feature 454: n = A,T,C or G
atgaatccatgaataataaagcgagaagaaaactggctggccaatgtgtgcaagaatctgttcaaggtggaaagtgtgaactgtatctgtgtggactggaaaggtggctcccgaactggatacacacaagcctcgcagaacatcaggatcgtgggagcagaagtggcatattttgttgaatttcttcagtcggcgttcggttactcaccttccaacgtgcatgtcattggccacagcctgggtgcccacgctgctggggaggctggaaggagaaccaatgggaccattggacgcatcacagggttggacccagcagaaccttgctttcagggcacacctgaattagtccgattggaccccagcgatgccaaatttgtggatgtaattcacacggatggtgcccccatagtccccaatttggggtttggaatgagccaagtcgtgggccacctanatttctttccaaatggaggagtggaaatgcctggatgtaaaaagaacattctctctc

SEQ ID NO: 3569 - DNA, 524 bp, Homo sapiens
accggttggaaggcactccctggtgtaatctgagatactgcacagacccatccactgtggaggacaagtgtgagaaggcctgccgccccgaggaggagtgccttgccctcaacagcacctggggctgtttctgcagacaggacctcaatagttctgatgtccacagtttgcagcctcagctagactgtgggcccagggagatcaaggtgaaggtggacaaatgtttgctgggaggcctgggtttgggggaggaggtcattgcctacctgcgagacccaaactgcagcagcatcttgcagacagaggagaggaactgggtatctgtgaccagccccgtccaggctagtgcctgcaggaacattctggagagaaatcaaacccatgccatctacaaaaacaccctctccttggtcaatgatttcatcatcagagacaccatcctcaacatcaacttccaatgtgcctacccactggacatgaaagtcagcctccaagctgccctgcagcccattgtaagttccctg

SEQ ID NO: 3570 - DNA, 263 bp, Homo sapiens
  misc_feature 64, 114, 149, 195, 223, 254: n = A,T,C or G
actcattccaatgaatttgactcagatgtggatgttggggacttgcagatggttaaatttattnggtataacaatgtgatcaacccaactttacctagagtgggagcatccaanattatagtggagacaaatgttggaaaacagttcancttctgtagtccagaaaccgtcagggaggaagttctgctcaccctnacaccgtgttaggagactactgttattngaccaatgaattgacttctaataaaatctantggtgatgc

SEQ ID NO: 3571 - DNA, 347 bp, Homo sapiens
accttattatcctacatcgcaaatttcaacagctacattatatttccttctgacacttggaaggtattgaaatttctagaaatgtatccttctcacaaagtagagaccaagagaaaaactcattgattgggtttctacttctttcaaggactcaggaaatttcactttgaactgaggccaagtgagctgttaagataacccacacttaaactaaaggctaagaatataggcttgatgggaaattgaaggtaggctgagtattgggaatccaaattgaattttgattctccttggcagtgaactactttgaagaagtggtcaatgggttgttgttgccatgagcatgt

SEQ ID NO: 3572 - DNA, 351 bp, Homo sapiens
  misc_feature 222: n = A,T,C or G
accttattatcctacatcgcaaatttcaacagctacattatatttccttctgacacttggaaggtattgaaatttctagaaatgtatccttctcacaaagtagagaccaagagaaaaactcattgattgggtttctacttctttcaaggactcaggaaatttcactttgaactgaggccaagtgagctgttaagataacccacacttaaactaaaggctaanaatataggcttgatgggaaattgaaggtaggctgagtattgggaatccaaattgaattttgattctccttggcagtgaactactttgaagaagtggtcaatgggttgttgttgccatgagcatgtacct

SEQ ID NO: 3573 - DNA, 649 bp, Homo sapiens
  misc_feature 611, 635: n = A,T,C or G
actatctggtttgagagtgcccttgaaaatttcatactgcttagagtttcctttatttccgaacaaagaaactagtatgtgtcctgtaaccttttttccagacagtgtgacagataccttatacctccaacgtgcaaaattactggcatcaccagtgtctagataaaatttctggcccacatcatttgttttcccaggatatctatcagcatagtgacccatctgtgggcagcctccacttggacaagggaaacacttgtttgcagtgaagacgttgtaagaggcacaggggaatccagcaaagccatcagggttgacgatgctatcagtgtaatatttgtagcttcttaagtgattacaggccgcaaagtctcgagtcccttcccagattccgtctatgtccacaatctgagagagaatgttctttttacatccaggcatttccactcctccatttggaaagaaatctaggtggcccacgacttggctcattccaaaccccaaattggggactatgggggcaccatccgtgtgaattacatccacaaatttggcatcgctggggtccaatcggactaattcaggtgtgccctgaaagcaaggttctgctnggtccaaccctgtgatgcgtccanggtcccattggttc

SEQ ID NO: 3574 - DNA, 259 bp, Homo sapiens
acgtgggtgaggggatggaggaaggcgagttttcagaggcccgtgaagatatggctgcccttgagaaggattatgaggaggttggtgtggattctgttgaaggagagggtgaggaagaaggagaggaatactaattatccattccttttggccctgcagcatgtcatgctcccagaatttcagcttcagcttaactgacaaatgttaaagctttctggttagattgttttcacttggtgatcatgtcttttccatgtgc

SEQ ID NO: 3575 - DNA, 463 bp, Homo sapiens
actatctggtttgagagtgcccttgaaaatttcatactgcttagagtttcctttatttccgaacaaagaaactagtatgtgtcctgtaaccttttttccagacagtgtgacagataccttatacctccaacgtgcaaaattactggcatcaccagtgtctagataaaatttctggcccacatcatttgttttcccaggatatctatcagcatagtgacccatctgtgggcagcctccacttggacaagggaaacacttgtttgcagtgaagacgttgtaagaggcacaggggaatccagcaaagccatcagggttgacgatgctatcagtgtaatatttgtagcttcttaagtgattacaggccgcaaagtctcgagtcccttcccagattccgtctatgtccacaatctgagagagaatgttctttttacatccaggcatttccactcctccatttggaaag

SEQ ID NO: 3576 - DNA, 493 bp, Homo sapiens
gaaagactcggctgcttcagtgatgactccccatggtcaggaattacggaaagacccctccatatattgccttggtctccaaaagatgtcaacacccgcttcctcctatatactaatgagaacccaaacaactttcaagaagttgccgcagattcatcaagcatcagtggctccaatttcaaaacaaatagaaaaactcgctttattattcatggattcatagacaagggagaagaaaactggctggccaatgtgtgcaagaatctgttcaaggtggaaagtgtgaactgtatctgtgtggactggaaaggcggctcccgaactggatacacacaagcctcgcagaacatcaggatcgtgggggcagaagtggcatattttgttgaatttcttcagtcggcgttcggttactcaccttccaacgtgcatgtcattggccacagcctgggtgcccacgctgctggggaggctggaaggagaaccaatgggacca

SEQ ID NO: 3577 - DNA, 331 bp, Homo sapiens
acttatggacgtgagatccaagtgacagagcttctcaacaagttagacttttatgtcctgcctgtgctcaatattgatggctacatctacacctggaccaagagccgattttggagaaagactcgctccacccatactggatctagctgcattggcacagaccccaacagaaattttgatgctggttggtgtgaaattggagcctctcgaaacccctgtgatgaaacttactgtggacctgccgcagagtctgaaaaggagaccaaggccctggctgatttcatccgcaacaaactctcttccatcaaggcatatctgacaatccactcgt

SEQ ID NO: 3578 - DNA, 519 bp, Homo sapiens
acatacggggtttcatcatgttggccaggctggtctccaactcctgacctcaagtgatccgcccacttcagcctcccaaagtgctgggattacaggcgtgagccaccatgcctggtctttacatgggctttaatgtttagaaatgattttgctttcctctgtaggtgtctctgcaactttggcactatctatagtgaaaaaagcatggccagctgcaccttactcaaggaggaaaagcattgttcctacctctgcctttgccctggtagcctcctgacattgccggcaaggagcaactcagaatggtctgcttcttccatttgctaccctccattcaaagcagtgtcatattatttgaaattgtgtcagtatgtccttttacagagtttcagagttctacccagtgggctagtgattaccccgattaccctcacattcagcttgcagctgacatctgccttgtgttgcacatggatctgttttgcagcaagcattacttgctggtgagggtggattggt

SEQ ID NO: 3579 - DNA, 331 bp, Homo sapiens
  misc_feature 316: n = A,T,C or G
acctatggacgtgagatccaagtgacagagcttctcaacaagttagacttttatgtcctgcctgtgctcaatattgatggctacatctacacctggaccaagagccgattttggagaaagactcgctccacccatactggatctagctgcattggcacagaccccaacagaaattttgatgctggttggtgtgaaattggagcctctcgaaacccctgtgatgaaacttactgtggacctgccgcagagtctgaaaaggagaccaaggccctggctgatttcatccgcaacaaactctcttccatcaaggcatatntgacaatccactcgt

SEQ ID NO: 3580 - DNA, 207 bp, Homo sapiens; identical to SEQ ID NO: 2996

SEQ ID NO: 3581 - DNA, 539 bp, Homo sapiens
gacggaactgccacgatgctgccactttggactctttcactgctgctgggagcagtagcaggaaaagaagtttgctacgaaagactcggctgcttcagtgatgactccccatggtcaggaattacggaaagacccctccatatattgccttggtctccaaaagatgtcaatacccgcttcctcctatatactaatgagaacccaaacaactttcaagaagttgccgcagattcatcaagcatcagtggctccaatttcaaaacaaatagaaaaactcgctttattattcatggattcatagacaggggagaagaaaactggctggccaatgtgtgcaagaatctgttcaaggtggaaagtgtgaactgtatctgtgtggactggaaaggtggctcccgaactggatacacacaagcctcgcagaacatcaggatcgtgggagcagaagtggcatattttgttgaatttcttcagtcggcgttcggttactcaccttccaacgtgcatgtcattggccacagcctgggtgcccacgctgc

SEQ ID NO: 3582 - DNA, 527 bp, Homo sapiens
cggaactgccacgatgctgccactttggactctttcactgctgctgggagcagtagcaggaaaagaagtttgctacgaaagactcggctgcttcagtgatgactccccatggtcaggaattacggaaagacccctccatatattgccttggtctccaaaagatgtcaacacccgcttcctcctatatactaatgagaacccaaacaactttcaagaagttgccgcagattcatcaagcatcagtggctccaatttcaaaacaaatagaaaaactcgctttattattcatggattcatagacaagggagaagaaaactggctggccaatgtgtgcaagaatctgttcaaggtggaaagtgtgaactgtatctgtgtggactggaaaggtggctcccgaactggatacacacaagcctcgcagaacatcaggatcgtgggagcagaagtggcatattttgttgaatttcttcagtcggcgttcggttactcaccttccaacgtgcatgtcattggccacagcctgggtg

SEQ ID NO: 3583 - DNA, 156 bp, Homo sapiens
actcgcccaacaccacctggtaggtccaggagctcgagatgcagtggccggcagtcacaacccagtcgggggcgatgaggctaccgccacacgtgtggtagaagcttccacttttctcatactgcagggaaacctgccagggccagctgtagggga

SEQ ID NO: 3584 - DNA, 379 bp, Homo sapiens
caaaatcagcctggccaaaatgctgggattacaggcatgagccactgcgcccagccgagagttttaaagaaggtgaaagctcttcccttttcctaacctagcctggccttgattctgttaataccaagcctgtgtgaattggagtggaaagcagaagtgctgaagggagccattgccagagggaagaacacaaacttcaaggccagatgctcagcggagctctcagaacagccaagccaggaggacagtcaggaggaccataggccaggccaccaggaaccctgcagtgctaggggttccattcatgacaccgggagactgtgcacctctccgagtgatgggccccaaatctagaacccgggctaggtcgatggccggt

SEQ ID NO: 3585 - DNA, 213 bp, Homo sapiens; identical to SEQ ID NO: 3345

SEQ ID NO: 3586 - DNA, 539 bp, Homo sapiens
gacggaactgccacgatgctgccactttggactctttcactgctgctgggagcagtagcaggaaaagaagtttgctacgaaagactcggctgcttcagcgatgactccccatggtcaggaattacggaaagacccctccatatattgccttggtctccaaaagatgtcaacacccgcttcctcctatatactaatgagaacccaaacaactttcaagaagttgccgcagattcatcaagcatcagtggctccaatttcaaaacaaatagaaaaactcgctttattattcatggattcatagacaagggagaagaaaactggctggccaatgtgtgcaagaatctgttcaaggtggaaagtgtgaactgtatctgtgtggactggaaaggtggctcccgaactggatacacacaagcctcgcagaacatcaggatcgtgggagcagaagtggcatattttgttgaatttcttcagtcggcgttcggttactcaccttccaacgtgcatgtcattggccacagcctgggtgcccacgctgc

SEQ ID NO: 3587 - DNA, 536 bp, Homo sapiens
acacaatggtttattaaaggaatgtatggcccacatcaacctagcaaggattctactggtaaaccttcctatggccaaaggaaaaacaagcaggagttgagtggctggggtggggtgcaggcaatggagagagggcagaagggtgtagaagctgaaggggtctagaagcttactcctgagtttcttccttctgtcttcaaatctttacttcttatggccaaagacccagctgtttcataggctggagatgcactcttctagactgctcgagacagccagagacaggggaggagggaagaaggatactgtggaaagggatggcggggcaaacatttagagctagaagccactactgggccaatgctaaagtttctgtctctaagcctaaaaaagccagtgtagtagggcccttatcactcttagtttgctaggtttcccctctgaaataatgagcagatttagccaggctagcagaaaggaagaggacggggctgtgcaggagttagcagaatcttgattcttgctctatggtcagt

SEQ ID NO: 3588 - DNA, 544 bp, Homo sapiens
acaaaaagggctacattctaaatagtaaaaaaatatgcaaactgaggtataaataagattatattctgtgtatcagtgactctagaggttaaaaatgactgagaaaatagacagttcttcaggaaaacaccttctttggactcacaccatgtgttttccattcaaattagtaatgttcaatttttcctgcagttgaaccagctattagctttctggagagtcaaaattctcttcgttttaggatcaaatttgtattgtcttgttccatgaaagaaatagaaaaatccatctttcatgaaaactgcatcaactttgtggccaattccaggaaagtcatgtgctatcattttgggataacctggatccatagatcgtttatattcatcatacctccagtatttgttagcaacaaagaagtaggtttttccagtgttttcctcagaaagagcagcatcgatatgcttcacagttctagggaagccaaaggagctgtagatgtccttggggtatccgtgtagcacattctgtccctgaacagcccagt

SEQ ID NO: 3589 - DNA, 381 bp, Homo sapiens
actatctggtttgagagtgcccttgaaaatttcatactgcttagagtttcctttatttccgaacaaagaaactagtatgtgtcctgtaaccttttttccagacagtgtgacagataccttatacctccaacgtgcaaaattactggcatcaccagtgtctagataaaatttctggcccacatcatttgttttcccaggatatctatcagcatagtgacccatctgtgggcagcctccacttggacaagggaaacacttgtttgcagtgaagacgttgtaagaggcacaggggaatccagcaaagccatcagggttgacgatgctatcagtgtaatatttgtagcttcttaagtgattacaggccgcaaagtctcgagtccc

SEQ ID NO: 3590 - DNA, 556 bp, Homo sapiens
acaaactggaagataattttataaaaccgtaaagagatctttgtaaattgcagtgtgtctgcttataaacaaatcaaatcgatctccatttcttcaagtgtcaaaaacaaaagagtagctggacattggtttttataatcagtttcagagaaaatacaggaataatgatcaatggcattttgaagcagataaaactgccaagttttatgcttgagtctatcattctgtgatttgctataatagtattcctttctattaggtgttcccgacaatattagttctatattcatttgatatgagcatttatattaaacttcaaaattacctcggatagtatccagaatatatgtcagaaacccctaaaagcaacttctattttcctcttaattaagataatatttagccatgttaataactattgaaatgacaaggtcagattttcaaaaccagtagggtgctttgcagtgaacgtgcatatgctggagcatctggccaagttacaatgcagttatcaatgcttagttcttcttggttttcttcagatagtgagcccgtg

SEQ ID NO: 3591 - DNA, 230 bp, Homo sapiens; identical to SEQ ID NO: 3096

SEQ ID NO: 3592 - DNA, 470 bp, Homo sapiens
actgctaataaatcaacagtggaaggcattcaggcctcagtgaagacggcccgagaactcacaccccaggtggtctcggctgctcgtatcttacttaggaaccctggaaatcaagctgcttatgaacattttgagaccatgaagaaccagtggatcgataatgttgaaaaaatgacagggctggtggacgaagccattgataccaaatctctgttggatgcttcagaagaagcaattaaaaaagacctggacaagtgcaaggtagctatggccaacattcagcctcagatgctggttgctggggcaaccagtattgctcgtcgggccaaccggatcctgctggtggctaagagggaggtggagaattccgaggatcccaagttccgtgaggctgtgaaagctgcctctgatgaattgagcaaaaccatctccccgatggtgatggatgcaaaagctgtggctggaaacat

SEQ ID NO: 3593 - DNA, 541 bp, Homo sapiens
accatagtatttggagcttctataggagtggagaggggcagctcattgttgagagttgcatgctgcaacctaatggtcagcaatgaaataaatacttgtagaatgttcacttcagtgtgaagttttgttatctagttaatttatatacatatatcctttgtagatacatttctatctaatcttgttgggctaattaagaaataaggggtggggtaattgtcaacaaagggagaagaaagtggtttaagatcagggcagcagaaaaattagagaacaagaatatcataatatggctcctggttttctttataagaggcagtgggaagatctgactagatgaaatgtatcatcaaccaaactggcatctaaaatagaatgggataaatactgtatggggttattggaggcatattaagaaaggacacctaatttattttgggaagaagtatgttaagagaagactttctagagaaggagaatggggcattctaggaagagtcaatggcatgtgcaaaggcatgaataaagacagtgaggcata

SEQ ID NO: 3594 - DNA, 257 bp, Homo sapiens; identical to SEQ ID NO: 3257

SEQ ID NO: 3595 - DNA, 257 bp, Homo sapiens
acatccgctccggctgcaacggtgactctggaggacccctcaactgccccacagaggatggtggctggcaggtccacggtgtgaccagctttgtttctggctttggctgcaacttcatctggaagcccacggtgttcactcgagtctccgccttcatcgactggattgaggagaccatagcaagccactagaaccaaggcccagctggcagtgctgatcgatcccacatcctgaataaagaataaagatctctcaga

SEQ ID NO: 3596 - DNA, 331 bp, Homo sapiens; identical to SEQ ID NO: 3037

SEQ ID NO: 3597 - DNA, 439 bp, Homo sapiens
actagttgctggcccagagtaagcactatataatttttagctattagtaattatgagtaacctaattaccatctattgaacactgcttactgtatggccaatactgtaaagtgttcttatattctttagttctagtccttctgtcattcctatgaagtaggtatacttcccattttacagagtcagtcatttagtgtaacttttccaaggtcacatagtaagtggctgatccagaattcatacatgtaagtgcttgctcattccactatgccactctcctatttagagtgctggaactgggacagtttctgatcttctgaaatatttgtggtttggagttttaagtggaaaatttttaagagagtgaagcaaagcttcttctaggaactttgtgaatcttaaagctggtaaattagacatttaagtatcttctaggagt

SEQ ID NO: 3598 - DNA, 331 bp, Homo sapiens; identical to SEQ ID NO: 2994

SEQ ID NO: 3599 - DNA, 207 bp, Homo sapiens; identical to SEQ ID NO: 2996

SEQ ID NO: 3600 - DNA, 224 bp, Homo sapiens
acacccacacctattcatactcgtgctctggctcggcaatcacctgtagcagcaaaaacaaagagtgtgaggccttcatttgcaactgcgaccgcaacgctgccatctgcttttcaaaagctccatataacaaggcacacaagaacctggacaccaagaagtattgtcagagttgaatatcacctctcaaaagcatcacctctatctgcctcatctcacactgt

SEQ ID NO: 3601 - DNA, 410 bp, Homo sapiens
  misc_feature 205, 270, 286, 296, 297, 358, 381: n = A,T,C or G
actggtatctgattgttcttacagaaactcaggatgaaaaccgaagaagaggcccggactcatacagagattgaaatgttccttagaaaggagcagcagaaacttgaggagaggctggagttctggatggagaaatacgataaggacacagaaatgaaacagaatgaactaaatgctctcaaagccacaaaggccagtgacttancacaccttcaagacctggcaaagatgataagagagtatgaacaggtcatcattgaagatcgtatngaaaaggagaggagcnagaagaaggnnaaacaggatctcttggaattaaagagcgttataaagctccaggcctggtggcgaggcactntgatacggagagaaattggtggnttcaagatgcctaaagacaaagttgatag

SEQ ID NO: 3602 - DNA, 520 bp, Homo sapiens
  misc_feature 491: n = A,T,C or G
ccccatagtccccaatttggggtttggaatgagccaagtcgtgggccacctagatttctttccaaatggaggagtggaaatgcctggatgtaaaaagaacattctctctcagattgtggacatagacggaatctgggaagggactcgagactttgcggcctgtaatcacttaagaagctacaaatattacactgatagcatcgtcaaccctgatggctttgctggattcccctgtgcctcttacaacgtcttcactgcaaacaagtgtttcccttgtccaagtggaggctgcccacagatgggtcactatgctgatagatatcctgggaaaacaaatgatgtgggccagaaattttatctagacactggtgatgccagtaattttgcacgttggaggtataaggtatctgtcacactgtctggaaaaaaggttacaggacacatactagtttctttgttcggaaataaaggaaactctaagcagtatgaanttttcaagggcactctcaaaccagatagt

SEQ ID NO: 3603 - DNA, 536 bp, Homo sapiens
  misc_feature 486: n = A,T,C or G
actatctggtttgagagtgcccttgaaaatttcatactgcttagagtttcctttatttccgaacaaagaaactagtatgtgtcctgtaaccttttttccagacagtgtgacagataccttatacctccaacgtgcaaaattactggcatcaccagtgtctagataaaatttctggcccacatcatttgttttcccaggatatctatcagcatagtgacccatctgtgggcagcctccacttggacaagggaaacacttgtttgcagtgaagacgttgtaagaggcacaggggaatccagcaaagccatcagggttgacgatgctatcagtgtaatatttgtagcttcttaagtgattacaggccgcaaagtctcgagtcccttcccagattccgtctatgtccacaatctgagagagaatgttctttttacatccaggcatttccactcctccatttggaaagaaatctaggtggcccacgacttngctcattccaaaccccaaattggggactatgggggcaccatccgtgtgaa

SEQ ID NO: 3604 - DNA, 224 bp, Homo sapiens; identical to SEQ ID NO: 3600

SEQ ID NO: 3605 - DNA, 411 bp, Homo sapiens
  misc_feature 353: n = A,T,C or G
actgaatgtcatctgcatggtcggcccccacccatttggggtagacgggcatccgagagggatgggaaaacaggtaggcgtaggtcttggcactcttggcattggctctgtgctgggctagggcaatctcggtgggcaccaggaagaggacatcggtctcaaagtccaccacagtcttcttcttattctcctgggatgggtcctgggcccaggactcggtgtagacatcaaaggtcgtcttggcgcctctgagccccttggtgattgtgaactcactgaccagcttgtagaagtcctcctccgtgactttcttgttgcccttgttgatggcaggcatgtcgatgctggcgaanatgtggccgtccatgttgttggtgcctgctatatagtcgatgtcggcggcgttggcgt

SEQ ID NO: 3606 - DNA, 135 bp, Homo sapiens
ggaaaggtggctcccgaactggatacacacaagcctcgcagaacatcaggatcgtgggagcagaagtggcatattttgttgaatttcttcagtcggcgttcggttactcaccttccaacgtgcatgtcattggcc

SEQ ID NO: 3607 - DNA, 304 bp, Homo sapiens; identical to SEQ ID NO: 3532

SEQ ID NO: 3608 - DNA, 295 bp, Homo sapiens
ggcaagtttgccaattccgaagtggaggtcaagtccattgtagactttgtgaaggaccatgggaacatcaaggccttcatctccatccacagctactcccagctcctcatgtatccctatggctacaaaacagaaccagtccctgaccaggatgagctggatcagctttccaaggctgctgtgacagccctggcctctctctacgggaccaagttcaactatggcagcatcatcaaggcaatttatcaagccagtggaagcactattgactggacctacagccagggcatcaagt

SEQ ID NO: 3609 - DNA, 280 bp, Homo sapiens
acagaggccagggagtgaaaatggttgacagaagagggaagagttaggtgtctcatagtcactcatagtggggtggtcaggggtaatggcatctccccactttaggcttctcaaacagacttttgacacctctcaagttcagagctctgatgtggaaagacaggaggtgtggggaaggagggggatttcgtgtgtttgcatgagtgtgcgcttcaggccttgggagttggcaagagggagggaaggaaggagagcaaaatcttcggaaggtgtttcttgt

SEQ ID NO: 3610 - DNA, 571 bp, Homo sapiens
  misc_feature 351: n = A,T,C or G
acctctatgtttaaagaaagaagaaaaaaacccagaatttggttgtagaaaacaatgcccacaacagactggccagtgcttagacaaatttggggttggggggaacactttggtttgaaagcacagagcagtttgccatgtttcttctgtgcctaccattctcccttggcctcaacttctgtaagatgggggggggacaaaaagagaagtaaagttaagaagaaagtggaaaattaaaaaaaaagatgtcaaagtttttacatgcatatatttcagcttatgctgaagacctacctgtatgttgcacattgaatcatactttcagaacccctcagaaaccatccctctctncctaaagaattttaaaaggaaaacaaaacctcgagtatagatcttacagatgagcaagcattcaggccttagccaaagaatgcagtggagccttcccccttcaactgcattgtgaatgaataccaattaacagcataaaaattaatagtcccatatcagatctggaaggggtttctggggctgtctgatgtccctatcctgttgtagtgaacacaatagc

SEQ ID NO: 3611 - DNA, 294 bp, Homo sapiens
  misc_feature 265: n = A,T,C or G
actcattccaatgaatttgactcagatgtggatgttggggacttgcagatggttaaatttatttggtataacaatgtgatcaacccaactttacctagagtgggagcatccaagattatagtggagacaaatgttggaaaacagttcaacttctgtagtccagaaaccgtcagggaggaagttctgctcaccctcacaccgtgttaggagactactgttatttgaccaatgaattgacttctaataaaatctagtggtgattccnaaaaaaaaaaaaaaaaaaaaaaagcttgt

SEQ ID NO: 3612 - DNA, 230 bp, Homo sapiens
acgaacagcctctcttacaaaccactggcagaatgcaggagaaatccactctctggcatggaagccacagtccatgaaaatggcaggcttattttgtccagctttgccaaccttcaggaggtaaatagcgcgtccctcaaatgtggttccgataacactgcgagagatgagggctggattctcagtggcgacttgttgagtccaagcctctatcgtttcccacttgttgt

SEQ ID NO: 3613 - DNA, 513 bp, Homo sapiens
  misc_feature 362, 411, 473: n = A,T,C or G
cttatggaaaggatggtgggctctggcctcctgtggctggccttggtctcctgcattctgacccaggcatctgcagtgcagcgagacccatccactgtggaggacaagtgtgagaaggcctgccgccccgaggaggagtgccttgccctcaacagcacctggggctgtttctgcagacaggacctcaatagttctgatgtccacagtttgcagcctcagctagactgtgggcccagggagatcaaggtgaaggtggacaaatgtttgctgggaggcctgggtttgggggaggaggtcattgtctacctgcgagacccaaactgcagcagcatcttgcagacagaggagaggaactgggtatntgtgaccagccccgtccaggctagtgcctgcaggaacattctggagagnaaatcaaacccatgccatctacaaaaacaccctctccttggtcaatgatttcatcatcaganacaccatcctcaacatcaactttcaatgtgcctacccact

SEQ ID NO: 3614 - DNA, 359 bp, Homo sapiens
  misc_feature 288, 358: n = A,T,C or G
acatagcataaaaactctgcagagaagtattcccaataaggaaatagcattgaaatgttaaatacaatttctgaaagttatgttttttttctatcatctggtataccattgctttatttttataaattattttctcattgccattggaatagatatctcagattgtgtagatatgctatttaaataatttatcaggaaatactgcctgtagagttagtatttctatttttatataatgtttgcacactgaattgaagaattgttggttttttcttttttttgttttgntttttttttttttttttttgcttttgacctcccatttttactatttgccaatacctttttctaggaatgng

SEQ ID NO: 3615 - DNA, 207 bp, Homo sapiens; identical to SEQ ID NO: 2996

SEQ ID NO: 3616 - DNA, 575 bp, Homo sapiens
atcacagggttggacccagcagaaccttgctttcagggcacacctgaattagtccgattggaccccagcgatgccaaatttgtggatgtaattcacacggatggtgcccccatagtccccaatttggggtttggaatgagccaagtcgtgggccacctagatttctttccaaatggaggagtggaaatgcctggatgtaaaaagaacattctctctcagattgtggacatagacggaatctgggaagggactcgagactttgcggcctgtaatcacttaagaagctacaaatattacactgatagcatcgtcaaccctgatggctttgctggattcccctgtgcctcttacaacgtcttcactgcaaacaagtgtttcccttgtccaagtggaggctgcccacagatgggtcactatgctgatagatatcctgggaaaacaaatgatgtgggccagaaattttatctagacactggtgatgccagtaattttgcacgttggaggtataaggtatctgtcacactgtctggaaaaaaggttacaggacacatactagtttctttgttcggaaataa

SEQ ID NO: 3617 - DNA, 404 bp, Homo sapiens; identical to SEQ ID NO: 3485

SEQ ID NO: 3618 - DNA, 571 bp, Homo sapiens
  misc_feature 562: n = A,T,C or G
acttcactgcggacttgacttcttgagcaagaaggctggcactgttcattaagagaatcacagagatgaatctcacaatgcaggaaaactaggtcataatgtccagcaaacatgaacatctgaactgagaaccggctttccgaggactgcccattctcctccacgtggatggtggaatcacgttgatttgagcagctgtttctgatgatgaaatacttcacaaggtcagccttgtcttcagtgggggtggcatagcagttcctcaacaccaggttaaaccgggaggtgtccccttgttccaagatggcacccacatacagcacggactcaacagacagttcaactgcatccccttcgtaaggattcgtgtagttctggtcttggaagagggccatcctgacaatgaactctccattcccgtccacactgacgttcagggaacttacaatgggctgcaaggcagcttggaggctgactttcatgtccagtgggtaggcacattggaagttgatgttgaggatggtgtctctgatgatgaaatcattgaccaaggagagggtgnttttgtaga

SEQ ID NO: 3619 - DNA, 373 bp, Homo sapiens
gtggaccccaacaggaactgggacgctggctttgggttgtccggagccagcagtaacccctgctcggagacttaccacggcaagtttgccaattccgaagtggaggtcaagtccattgtagactttgtgaaggaccatgggaacatcaaggccttcatctccatccacagctactcccagctcctcatgtatccctatggctacaaaacagaaccagtccctgaccaggatgagctggatcagctttccaaggctgctgtgacagccctggcctctctctacgggaccaagttcaactatggcagcatcatcaaggcaatttatcaagccagtggaagcactattgactggacctacagccagggcatcaagt

SEQ ID NO: 3620 - DNA, 230 bp, Homo sapiens; identical to SEQ ID NO: 3096

SEQ ID NO: 3621 - DNA, 522 bp, Homo sapiens
actatctggtttgagagtgcccttgaaaatttcatactgcttagagtttcctttatttccgaacaaagaaactagtatgtgtcctgtaaccttttttccagacagtgtgacagataccttatacctccaacgtgcaaaattactggcatcaccagtgtctagataaaatttctggcccacatcatttgttttcccaggatatctatcagcatagtgacccatctgtgggcagcctccacttggacaagggaaacacttgtttgcagtgaagacgttgtaagaggcacaggggaatccagcaaagccatcagggttgacgatgctatcagtgtaatatttgtagcttcttaagtgattacaggccgcaaagtctcgagtcccttcccagattccgtctatgtccacaatctgagagagaatgttctttttacatccaggcatttccactcctccatttggaaagaaatctaggtggcccacgacttggctcattccaaaccccaaattggggactatgggggc

SEQ ID NO: 3622 - DNA, 213 bp, Homo sapiens; identical to SEQ ID NO: 3148

SEQ ID NO: 3623 - DNA, 60 bp, Homo sapiens
  misc_feature 20, 21, 27: n = A,T,C or G
acactcaaactttatttggnngcctgnatggggccagagaggaggacaagaagggtgtca

SEQ ID NO: 3624 - DNA, 255 bp, Homo sapiens
  misc_feature 1, 4, 34, 42, 50, 63, 82, 100, 109, 140, 197, 220, 239: n = A,T,C or G
nccngctgctcagttccctcctccttgtggccgntgcctcangctatggnccaccttcctctnactcttccagccgcgttgnccatggtgaggatgcggncccctacanctggccctggcaggtttccctgcagtatganaaaagtggaagcttctaccacacgtgtggcggtagcctcatcgcccccgattgggtngtgactgccggccactgcatctngagggatctgacctaccangtggtgttgggtgagt

SEQ ID NO: 3625 - DNA, 331 bp, Homo sapiens; identical to SEQ ID NO: 3037

SEQ ID NO: 3626 - DNA, 190 bp, Homo sapiens
acggaattttaggtgattcatgtcctgctacaggctctccttgtgctctacaaagtctgtcacgaagctgcatgatatttggctggttggtgttgtcaggaagaaaagccaaggctgcagcaatactgccctgagctgccaacaaattggcatactgactcatcttcgcagccaagagaactcctacagt

SEQ ID NO: 3627 - DNA, 190 bp, Homo sapiens; identical to SEQ ID NO: 3392

SEQ ID NO: 3628 - DNA, 559 bp, Homo sapiens
  misc_feature 538, 542: n = A,T,C or G
acaaactggaagataattttataaaaccgtaaagagatctttgtaaattgcagtgtgtctgcttataaacaaatcaaatcgatctccatttcttcaagtgtcaaaaacaaaagagtagctggacattggtttttataatcagtttcagagaaaatacaggaataatgatcaatggcattttgaagcagataaaactgccaagttttatgcttgagtctatcattctgtgatttgctataatagtattcctttctattaggtgttcccgacaatattagttctatattcatttgatatgagcatttatattaaacttcaaaattacctcggatagtatccagaatatatgtcagaaacccctaaaagcaacttctattttcctcttaattaagataatatttagtcatgttaataactattgaaatgacaaggtcagattttcaaaaccagtagggtgctttgcagtgaacgtgcatatgctggagcatctggccaagttacaatgcagttatcaatgcttagttcttcttggttttcntcanatagtgagcccgtgtag

SEQ ID NO: 3629 - DNA, 470 bp, Homo sapiens
acccggacagggagacactgagcaggtggtccttctgccataggcagcccagctgctggtccagaaccgtggagcccatgggaaatgtgctgaccacggagttcacgctgacgtcccaaatcttggaagttttgtccccagaagcagaaagcaaatgggtgctgtcgggactccaactaattgcgtaaatcccaccgtcgtgggccttgcttccgcccagcgcgcacaccttctccccagtcttcccgtcatagatgtatatctggccgtcagcactggctgtggcaaatctgttcccatcaggagagaatcgcacacagttgacaaagcggctgtggtcgccaactgtgaacttgaacttgaatgggggtccctcaaagaatgccgcgcagttatcatcacttcccgtggccagccggtatggccggctctgcttgatgtccacgctgttgatgactttgttgtgtcct

SEQ ID NO: 3630 - DNA, 331 bp, Homo sapiens; identical to SEQ ID NO: 3037

SEQ ID NO: 3631 - DNA, 215 bp, Homo sapiens
acacatatggcccgggagctacaacaatctatcctgctgctgggggctctgacgactgggcttatgaccaaggaatcagatattccttcacctttgaacttcgagatacaggcagatatggctttctccttccagaatcccagatccgggctacctgcgaggagaccttcctggcaatcaagtatgttgccagctacgtcctggaacacctgtaa

SEQ ID NO: 3632 - DNA, 212 bp, Homo sapiens
caggtgttccaggacgtagctggcaacatacttgattgccaggaaggtctcctcgcaggtagcccggatctgggattctggaaggagaaagccatatctgcctgtatctcgaagttcaaaggtgaaggaatatctgattccttggtcataagcccagtcgtcagagcccccagcagcaggatagattgttgtagctcccgggccatatgtgt

SEQ ID NO: 3633 - DNA, 492 bp, Homo sapiens
  misc_feature 69, 160, 165, 279, 291, 358, 369, 426, 455, 469, 479: n = A,T,C or G
acaagctttttttttttttttttttttttttttggtttaagtataaactttattcctgaatatcttcanatactttctgctagttcaaataaactcacacagacattaatccaatttgaataactacatatgaatgaggctacagtattattcaatccanagtgngtcacttccgttcatgaaggcttgctatgcataaatataaaaatattttatcttctgatgctttcatttttgaagcactcccttcaaaggatgtaaaaaaatattaaataaaanagctttcaaagngttctgttaggctatgatttgagggggagatgaatggaaatggatattgatagttatttaactgganatctttgtggngatatgtgaaagtataaactaactccaacaaactcgttttttcctgaaacttttggngtaaaattatatattattattattttganacagggtcttgctntgttgcccangccaggctggagt

SEQ ID NO: 3634 - DNA, 207 bp, Homo sapiens
  misc_feature 160, 183, 184, 187, 203: n = A,T,C or G
acactcaaactttatttggttgcctggatggggccagagaggaggacaagaagggtgtcaaagggtcagctcagtaggggtgattcagggtgtgctccatgatggtcagaagcgccagccacgtctccttggctgtggggatgatctgggaggctggcancaggaagccatagcgaccagtgnnccngagctcgaaggtgaangagt

SEQ ID NO: 3635 - DNA, 458 bp, Homo sapiens
  misc_feature 55, 81, 84, 106, 128, 133: n = A,T,C or G
gatgactccccatggtcaggaattacggaaagacccctccatatattgccttggnctccaaaagatgtcaacacccgcttnctnctatatactaatgagaacccanacaactttcaagaagttgccgnagatncatcaagcatcagtggctccaatttcaaaacaaatagaaaaactcgctttattattcatggattcatagacaagggagaagaaaactggctggccaatgtgtgcaagaatctgttcaaggtggaaagtgtgaactgtatctgtgtggactggaaaggtggctcccgaactggatacacacaagcctcgcagaacatcaggatcgtgggagcagaagtggcatattttgttgaatttcttcagtcggcgttcggttactcaccttccaacgtgcatgtcattggccacagcctgggtgcccacgctgctggggaggctggaaggag

SEQ ID NO: 3636 - DNA, 559 bp, Homo sapiens
gaaaatttgaataacaatgattatcttttgaatacgcatacgcaagggattggttgtctgaagaatgccactatagtagttatctattgtgtgccaatctcattgctaggcattggggatgcaaagataaaccatctttattgtgtcttgggtagcagaagaaaatatgtgtaaaatcaatttataatttgtaaactgccacccatatataagctatatctgctgaatgatcattgattactcttatccttagagataacaactgggggcacaaacatttattatcattattgaacctacaacagagatctatgtgtagatttacaaagcctacagttctatacagataggaatgaactattggcttactgaatggtgattactttctgtggggctcggaactacatgccctaggatataaaaatgatgttatcattatagagtgctcacagaaggaaatgaagtaatataggtgtgagatccagaccaaaagtcatttaacaagtttattcagtgatgaaaacatgggacaaatggactaatataaggcagtgtacct

SEQ ID NO: 3637 - DNA, 637 bp, Homo sapiens
  misc_feature 555, 615, 628: n = A,T,C or G
tgatttgctccttaagcaagagattcactgccgctaagcatggctcagaccaactcgttcttcatgctgatctcctccctgatgttcctgtctctgagccaaggccaggagtcccagacagagctgcctaatccccgaatcagctgcccagaaggcaccaatgcctatcgctcctactgctactactttaatgaagaccctgagacctgggttgatgcagatctctattgccagaacatgaattcaggcaacctggtgtctgtgctcacccaggcggagggtgccttcgtggcctcactgattaaggagagtagcactgatgacagcaatgtctggattggcctccatgacccaaaaaagaaccgccgctggcactggagtagtgggtccctggtctcctacaagtcctgggacactggatccccgagcagtgctaatgctggctactgtgcaagcctgacttcatgctcaggattcaagaaatggaaggatgaatcttgtgagaagaagttctcctttgtttgcaagttcaaaaactagaggaagctgaaaatngatgtctagaactggtcctgcaattactatgaagtcaaaaattaaactagactatgtctncaactcagttcanaccatctcc

SEQ ID NO: 3638 - DNA, 243 bp, Homo sapiens
gttccctcctccttgtggccgttgcctcaggctatggcccaccttcctctcactcttccagccgcgttgtccatggtgaggatgcggtcccctacagctggccctggcaggtttccctgcagtatgagaaaagtggaagcttctaccacacgtgtggcggtagcctcatcgcccccgattgggttgtgactgccggccactgcatctcgagggatctgacctaccaggtggtgttgggtgagt

SEQ ID NO: 3639 - DNA, 433 bp, Homo sapiens
  misc_feature 225: n = A,T,C or G
acatttacacagaattgtctttgcatgaagcccaagagggaacagcataaaaatgagtgtttctgtagcccctttatttttgctgatcaacagtttgttagaaaagcagctgcaggtatgttacctaaggtctgagacagtagaagagtcaaaggtgtcatgaattcacctgtaaacaaccttatgcctgaacatcagctaattctggaggaagtggagtcttangatgcttgctctcaaagtgctgcttgaaggtcttagggtctggcatttgtgtcctacagacagtgcaggtatatattaaggcagctttggcagcagccttttggtcatgtccttgtttcttcttttgtccagcttgctttttggcatttttctgctgagactgaattttctgctgtccacgagccatatccgggccgggacagtcttg

SEQ ID NO: 3640 - DNA, 230 bp, Homo sapiens
  misc_feature 206: n = A,T,C or G
acaacaagtgggaaacgatagaggcttggactcaacaagtcgccactgagaatccagccctcatctctcgcagtgttatcggaaccacatttgagggacgcgctatttacctcctgaaggttggcaaagctggacaaaataagcctgccattttcatggactgtggtttccatgccagagagtggatttctcctgcattctgccantggtttgtaagagaggctgttcgt

SEQ ID NO: 3641 - DNA, 381 bp, Homo sapiens
actatctggtttgagagtgcccttgaaaatttcatactgcctagagtttcctttatttccgaacaaagaaactagtatgtgtcctgtaaccttttttccagacagtgtgacagataccttatacctccaacgtgcaaaattactggcatcaccagtgtctagataaaatttctggcccacatcatttgttttcccaggatatctatcagcatagtgacccatctgtgggcagcctccacttggacaagggaaacacttgtttgcagtgaagacgttgtaagaggcacaggggaatccagcaaagccatcagggttgacgatgctatcagtgtaatatttgtagcttcttaagtgattacaggccgcaaagtctcgagtccc

SEQ ID NO: 3642 - DNA, 407 bp, Homo sapiens
atgaagacaacccccatggcaatgacagtgccaaagccagccgggccaggaccaaagccggtgatctccgagatacaggcatcttccttgacttgatgcacctgaagaaacctgggggctttgacatatccttgttctacagagatatcatcagcatagcagaggatggggacctcagggttcactttgaggaatccagcaagctagaagacctgttgcggaaggttcgcgccaaggagaccaggaagcgagcactcagcaggttaaagctgaagctcaacaaagatatagtgatctctgtgggcatttataatctggtccagaaggctctcaagcctcctccaataaagctctatcgggaaacaaatgaaccagtgaaaaccaagacccggacctttaatacaagt

SEQ ID NO: 3643 - DNA, 582 bp, Homo sapiens
actatctggtttgagagtgcccttgaaaatttcatactgcttagagtttcctttatttccgaacaaagaaactagtatgtgtcctgtaaccttttttccagacagtgtgacagataccttatacctccaacgtgcaaaattactggcatcaccagtgtctagataaaatttctggcccacatcatttgttttcccaggatatctatcagcatagtgacccatctgtgggcagcctccacttggacaagggaaacacttgtttgcagtgaagacgttgtaagaggcgcaggggaatccagcaaagccatcagggttgacgatgctatcagtgtaatatttgtagcttcttaagtgattacaggccgcaaagtctcgagtcccttcccagattccgtctatgtccacaatctgagagagaatgttctttttacatccaggcatttccactcctccatttggaaagaaatctaggtggcccacgacttggctcattccaaaccccaaattggggactatgggggcaccatccgtgtgaattacatccacaaatttggcatcgctggggtccaatcggactaattc

SEQ ID NO: 3644 - DNA, 244 bp, Homo sapiens
  misc_feature 41, 56, 75, 77, 122, 175: n = A,T,C or G
acagcatgtggagctggagagaggagtgagcagcagtgtanataaacaggcctggncgtgtgtggatgggttgtnanggctgagtggagttgcaaagggatttattataccatgatctctgnttgtgcatatgtttggagattttcataatcaaatgtgaaaatttttgattttnataatcaaaaatcaatacaaaatatgaatgtataacgtaattcctccatcatgacggtggtgggagtgg

SEQ ID NO: 3645 - DNA, 591 bp, Homo sapiens
  misc_feature 286: n = A,T,C or G
actatctggtttgagagtgcccttgaaaatttcatactgcttagagtttcctttatttccgaacaaagaaactagtatgtgtcctgtaaccttttttccagacagtgtgacagataccttatacctccaacgtgcaaaattactggcatcaccagtgtctagataaaatttctggcccacatcatttgttttcccaggatatctatcagcatagtgacccatctgtgggcagcctccacttggacaagggaaacacttgtttgcagtgaagacgttgtaagaggcncaggggaatccagcaaagccatcagggttgacgatgctatcagtgtaatatttgtagcttcttaagtgattacaggccgcaaagtctcgagtcccttcccagattccgtctatgtccacaatctgagagagaatgttctttttacatccaggcatttccactcctccatttggaaagaaatctaggtggcccacgacttggctcattccaaaccccaaattggggactatgggggcaccatccgtgtgaattacatccacaaatttggcatcgctggggtccaatcggactaattcaggtgtgcc

SEQ ID NO: 3646 - DNA, 528 bp, Homo sapiens
  misc_feature 139: n = A,T,C or G
actcacaaccttgcatcctcttatcctgcagtatgcttggatttagtccctagcttctaaggaacagaatatgatacaggtgatgggatgtcacttcggagattactaaaaaaaaaaaaaaaagtagcttctgtcttanacttgagcttgcatgctttctctttcactttgaaagaaatcagctgtcttgtgaatggacagaggccaagtagcaaagaaatgagagaagcctccagtctctagccagcaaggaactgaagtcttcaatccaacatagctcacaaggaactcagtcctgtcaacaatcttgagagagctcttagaaccagatccttcccaaatcaagccttcagaccagaaacagtcctagccaacatcttgatcacagcattcttagagacactgaaccaaaggcacccgggtaactataaccagagtccagacctacagaaactacgaggcaatatatgtttgttgctttaaacaactaagttttagggtaacctgttatacagccttgagtaatca

SEQ ID NO: 3647 - DNA, 537 bp, Homo sapiens
actttttttttcttttccacaaaagaaaaaccaggaatgtgtgtgtgcttgtgcacaggccctaaagtattgtcaacacattgtttaataatgtaatgaaagactttattactaggccacctggcattttccattccattgtggatatagtcatttcttaaagcaagtcagaggcataagttcattccttggcctttgaattccttaattagtatttgtcaggtaatattttgaagctaaaaataaacgatttataagctgagaagtaatttctagtcagattgctaatttgcttcaaattttccgttggattttctttagaagtcattagtgaccttccattgtttagaaaatatttagaaatccaaaaattagggttatattactgttagtttctcaggaggcatttgtaaagaagtatttttaactattagctgaacctgtttgttggcaagtgggcaaatagtgatctttcctactttgtctttttcaagtggatgctttctttaattccagattttaggcaagaaattgagc

SEQ ID NO: 3648 - DNA, 281 bp, Homo sapiens
acaattaccaagtgtaatcagttacagtaattctgtatgtatctcagcagtattattttccagcatggctttacattttaaagaacttaataactatagaataaacagatgcatgctatacgagttggaatgtattagagctgggttcccttttgtgtgtgtttgtgtcacgtgtttagtttatccatagtcatgaatactatgttgcctagatacggtggggaacaccgggaaagtgaaatgcagttttgttttctggaaggcaaaccaagattcttggt

SEQ ID NO: 3649 - DNA, 331 bp, Homo sapiens; identical to SEQ ID NO: 3099

SEQ ID NO: 3650 - DNA, 213 bp, Homo sapiens; identical to SEQ ID NO: 3148

SEQ ID NO: 3651 - DNA, 524 bp, Homo sapiens
cgcagattcatcaagcatcagtggctccaatttcaaaacaaatagaaaaactcgctttattattcatggattcatagacaagggagaagaaaactggctggccaatgtgtgcaagaatctgttcaaggtggaaagtgtgaactgtatctgtgtggactggaaaggcggctcccgaactggatacacacaagcctcgcagaacatcaggatcgtgggagcagaagtggcatattttgttgaatttcttcagtcggcgttcggttactcaccttccaacgtgcatgtcattggccacagcctgggtgcccacgctgctggggaggctggaaggagaaccaatgggaccattggacgcatcacagggttggacccagcagaaccttgctttcagggcacacctgaattagtccgattggaccccagcgatgccaaatttgtggatgtaattcacacggatggtgcccccatagtccccaatttggggtttggaatgagccaagtcgtgggccacctagatttctttc

SEQ ID NO: 3652 - DNA, 411 bp, Homo sapiens
actgaatgtcatctgcatggtcggcccccacccatttggggtagacgggcatccgagagggatgggaaaacaggtaggcgtaggtcttggcactcttggcattggctctgtgctgggctagggcaatctcggtgggcaccaggaagaggacatcggtctcaaagtccaccacagtcttcttcttattctcctgggatgggtcctgggcccaggactcagtgtagacatcaaaggtcgccttggcgcctctaagccccttggtgattgtgaactcactgaccagcttgtagaagtcctcctccgtgactttcttgttgcccttgttgatggcaggcatgtcgatgctggcgaagatgtggccgtccatgttgttggtgcctgctatatagtcgatgtcggcggcgttggcgt

SEQ ID NO: 3653 - DNA, 528 bp, Homo sapiens
cacgatgctgccactttggactctttcactgctgctgggagcagtagcaggaaaagaagtttgctacgaaagactcggctgcttcagtgatgactccccatggtcaggaattacggaaagacccctccatatattgccttggtctccaaaagatgtcaacacccgcttcctcctatatactaatgagaacccaaacaactttcaagaagttgccgcagattcatcaagcatcagtggctccaatttcaaaacaaatagaaaaactcgctttattattcatggattcatagacaagggagaagaaaactggctggccaatgtgtgcaagaatctgttcaaggtggaaagtgtgaactgtatctgtgtggactggaaaggtggctcccgaactggatacacacaagcctcgcagaacatcaggatcgtgggagcagaagtggcatattttgttgaatttcttcagtcggcgttcggttactcaccttccaacgtgcatgtcattggccacagcctgggtgcccacgctgc

SEQ ID NO: 3654 - DNA, 366 bp, Homo sapiens
acctgggcccagcccaggagatgtcctctccatctggaggggccagctcaaagaggctggaatttggcagatggcttcggtttgggggctagggaaggttggcaaccaggtagcaggctcggagaagttatttgatcttctgggcccatttcatgtcatctgcccgaggcttctcgcccgtcaggccctggatgaggtcctccaggcgtcgccagaagcctatcttctccagagggtagttgagccggcctgtggtgatgcagaagtaggtctcgtggggtgagacgtggtggatgcgatggtgtttacgtggcaggatgacatgccagtcctgcaggagggtgacccagcgtggcagcccaaagt

SEQ ID NO: 3655 - DNA, 526 bp, Homo sapiens
  misc_feature 448: n = A,T,C or G
ggcacttaccaacagagattgctgatttgctccttaagcaagagattcactgccgctaagcatggctcagaccaactcgttcttcatgctgatctcctccctgatgttcctgtctctgagccaaggccaggagtcccagacagagctgcctaatccccgaatcagctgcccagaaggcaccaatgcctatcgctcctactgctactactttaatgaagaccctgagacctgggttgatgcagatctctattaccagaacatgaattcaggcaacctggtgtctgtgctcacccaggcggggggtgccttcgtggcctcactgattaaggagagtagcactgatgacagcaatgtctggattggcctccatgacccaaaaaagaaccgccgctggcactggagtagtgggtccctggtctcctacaagtcctgggacactggatccccngagcagtgctaatgctggctactgtgcaagcctgacttcatgctcaggattcaagaaatggaaggatgaatcttgtga

SEQ ID NO: 3656 - DNA, 243 bp, Homo sapiens
actcacccaacaccacctggtaggtcagatccctcgagatgcagtggccggcagtcacaacccaatcgggggcgatgaggctaccgccacacgtgtggtagaagcttccacttttctcatactgcagggaaacctgccagggccagctgtaggggaccgcatcctcaccatggacaacgcggctggaagagtgagaggaaggtgggccatagcctgaggcaacggccacaaggaggagggaac

SEQ ID NO: 3657 - DNA, 396 bp, Homo sapiens
cggccgaggttagaaattgagatgcccccccaggccagcaaatgttcctttttgttcaaagtctatttttattccttgatatttttcctttttttttttttttgtggatggggacttgtgaatttttctaaaggtgctatttaacatgggaggagagcgtgtgcggctccagcccagcccgctgctcactttccaccctctctccacctgcctctggcttctcaggcctctgctctccgacctctctcctctgaaaccctcctccacagctgcagcccatcctcccggctccctcctagtctgtcctgcgtcctctgtccccgggtttcagagacaacttcccaaagcacaaagcagtttttccccctaggggtgggaggaagcaaaagactctgt

SEQ ID NO: 3658 - DNA, 371 bp, Homo sapiens
  misc_feature 65, 76, 121, 148, 229, 262, 294, 325, 331, 340: n = A,T,C or G
acaagcttttttttttttttttttttttttttttgaaggtttgcaggaggcctttaattgtgaanagcgcaatcanaaaacagatatgctggtcaaggaggtggccagcccgggagatgcnctggagcaggggagagatgcccctgcncctagtggcctacagcattctgggctaggtgtgggagtgggtgggcagtctcactgcttggagcgtccagcgtcatggcanatgccaaagttggtgttggtgatggagcccacnatggtcttgtctccctcacaggtcaggccacnctcacagggacacttgtagtaaatcccatanagcgtnttgacagancactcgctgttctcgctggccatggatgtgc

SEQ ID NO: 3659 - DNA, 230 bp, Homo sapiens; identical to SEQ ID NO: 3096

SEQ ID NO: 3660 - DNA, 331 bp, Homo sapiens
acgagtggattgtcagatatgccttgatggaagagagtttgttgcggatgaaatcagccagggccttggtctccttttcagactctgcggcaggtccacagtaagtttcatcacaggggtttcgagaggctccaatttcacaccaaccagcatcaaaatttctgttggggtctgtgccaatgcagctagatccagtatgggtggagcgagtctttctccaaaatcggctcttggtccaggtgtagatgtagccatcaatattgagcacaggcaggacataaaagtctaacttgtcgagaagctctgtcacttggatctcgcgtccataggt

SEQ ID NO: 3661 - DNA, 494 bp, Homo sapiens
  misc_feature 402, 452: n = A,T,C or G
actatctggtttgagagtgcccttgaaaatttcatactgcttagagtttcctttatttccgaacaaagaaactagtatgtgtcctgtaaccttttttccagacagtgtgacagataccttatacctccaacgtgcaaaattactggcatcaccagtgtctagataaaatttctggcccacatcatttgttttcccaggatatctatcagcatagtgacccatctgtgggcagcctccacttggacaagggaaacacttgtttgcagtgaagacgttgtaagaggcacaggggaatccagcaaagccatcagggttgacgatgctatcagtgtaatatttgtagcttcttaagtgattacaggccgcaaagtctcgagtcccttcccagattccgtctatgtncacaatctgagagagaatgttctttttacatccaggcatttccactcctncatttggaaagaaatctaggtggcccacgacttggctcattc

SEQ ID NO: 3662 - DNA, 461 bp, Homo sapiens
acattagcaccataacatgcgtctttagagccttcccaaatattagtaatcttgaccagcaatgacaagaaaaaagaggagcacctttacaagcagttgatatccaatattaaaataattgtggctttaaaaatatttctttaaattcttgcattacacttttctttttaaaccaatcttccaggagattaatcaatgaaatttataagttttatcaacgtataaaatttttttcatcttctgggactcatagaatacaatctgtgtttctgaccagttgaggtagttaaaatagggagggcttttctaatttcgtatttgactatttcagaaagaaaggttatcttttactggtgagcacagtcattgctctgcagatgggctaggattcaaagaatataacacagtgttgttatcataaagagtgttgaagtttatttattatagcaccattgagacat

SEQ ID NO: 3663 - DNA, 576 bp, Homo sapiens
gggtcacccaggccagtggggtctggtttgcaaagaagatcactcaagactacgggcaggatgcagctttcaccgccattctcgacaccttggacatcttcctggagatcgtcaccaaccctgatggctttgccttcacgcacagcacgaatcgcatgtggcgcaagactcggtcccacacagcaggctccctctgtattggcgtggaccccaacaggaactgggacgctggctttgggttgtccggagccagcagtaacccctgctcggagacttaccacggcaagtttgccaattccgaagtggaggtcaagtccattgtagactttgtgaaggaccatgggaacatcaaggccttcatctccatccacagctactcccagctcctcatgtatccctatggctacaaaacagaaccagtccctgaccaggatgagctggatcagctttccaaggctgctgtgacagccctggcctctctctacgggaccaagttcaactatggcagcatcatcaaggcaatttatcaagccagtggaagcactattgactggacctacagccagggcatcaagt

SEQ ID NO: 3664 - DNA, 385 bp, Homo sapiens
accctccagcacacaccatggttttcttcacggtggaaccccaccagttccacctggagcagtgcttatagtccaccacgggcagccgggcctgctgcagcttgtctgggagtggcccattggctgcaaggataaaaagcaccgagtcaggggtctgggggcacaccgctaggtgccccagaggaagggggcattcaaggcccacagttcttctgccctgatgaggactctcctcccacccgctaaatggtcctgcatgctttgtgcaccattacatccctagcacgtggcacacagaagataccaaaacatgtgcaattgaccacattcgtgttttggaggttgatggaagaaggctgcagctggagagaaatgggagaaaagt

SEQ ID NO: 3665 - DNA, 489 bp, Homo sapiens
accaaacgggcaaggacatctctacaaattactatgcgagtcagaagaaaacatttgaaattaatcccagacacccgctgatcagagacatgcttcgacgaattaaggaagatgaagatgataaaacagttttggatcttgctgtggttttgtttgaaacagcaacgcttcggtcagggtatcttttaccagacactaaagcatatggagatagaatagaaagaatgcttcgcctcagtttgaacattgaccctgatgcaaaggtggaagaagagcccgaagaagaacctgaagagacagcagaagacacaacagaagacacagagcaagacgaagatgaagaaatggatgtgggaacagatgaagaagaagaaacagcaaaggaatctacagctgaaaaagatgaattgtaaattatgctctcaccatttggatcctgtgtggagagggaatgtgaaatttacatcatttctttttgggagagacttg

SEQ ID NO: 3666 - DNA, 213 bp, Homo sapiens; identical to SEQ ID NO: 3345

SEQ ID NO: 3667 - DNA, 491 bp, Homo sapiens
acctgtggaagttacttcaaccctggaagtagggactttccagcagtcccatattctggatgggatttcaatgatggtaaatgtaaaactggaagtggagatatcgagaactacaatgatgctactcaggtcagagattgtcgtctgactggtcttcttgatcttgcactggagaaggattacgtgcgttctaagattgccgaatatatgaaccatctcattgacattggtgttgcagggttcagacttgatgcttccaagcacatgtggcctggagacataaaggcaattttggacaaactgcataatctaaacagtaactggttccctgcaggaagtaaacctttcatttaccaggaggtaattgatctgggtggtgagccaattaaaagcagtgactactttggtaatggccgggtgacagaattcaagtatggtgcaaaactcggcacagttattcgcaagtggaatggagagaagatgtcttactt

SEQ ID NO: 3668 - DNA, 539 bp, Homo sapiens
actgaagatcagcgatgcaaactcattagggaggagatggtctgaactgagttggagacatagtctagtttaatttttgacttcatagtaattgcaggaccagttctagacatccatttttcagcttcctctagtttttgaacttgcaaacaaaggagaacttcttctcacaagattcatccttccatttcttgaatcctgagcatgaagtcaggcttgcacagtagccagcattagcactgctcggggatccagtgtcccaggacttgtaggagaccagggacccactactccagtgccagcggcggttcttttttgggtcatggaggccaatccagacattgctgtcatcagtgctactctccttaatcagtgaggccacgaaggcaccctccgcctgggtgagcacagacaccaggttgcctgaattcatgttctggcaatagagatctgcatcaacccaggtctcagggtcttcattaaagtagtagcagtaggagcgataggcattggtgccttctgggcagctgattcgggga

SEQ ID NO: 3669 - DNA, 255 bp, Homo sapiens; identical to SEQ ID NO: 3458

SEQ ID NO: 3670 - DNA, 495 bp, Homo sapiens
acatcatgagcctcagctcagtgacaaggttcacaatgatgctcagagttttgattatgaccatgatgccttcttgggtgctgaagaagcaaagacctttgatcagctgacaccagaagagagcaaggaaaggcttggaaagattgtaagtaaaatagatggcgacaaggacgggtttgtcactgtggatgagctcaaagactggattaaatttgcacaaaagcgctggatttacgaggatgtagagcgacagtggagggggcatgacctcaatgaggacggcctcgtttcctgggaggagtataaaaatgccacctacggctacgttttagatgatccagatcctgatgatggatttaactataaacagatgatggttagagatgagcggaggtttaaaatggcagacaaggatggagacctcattgccaccaaggaggagttcacagctttcctgcaccctgaggagtatgactacatgaaagatatagtagt

SEQ ID NO: 3671 - DNA, 532 bp, Homo sapiens
  misc_feature 428: n = A,T,C or G
actggtgagtgtttcccttatttccaaacaaagcaactttgatctgactagtggctgttcttccagacagtgtgatggaaaccccatatctccagcgagcgaaattgctagcctctcctgtgttcaagaagaatttctgctgctcttcacttgtcctgccagcaaatttatcagcatagtgacccatctgtgggcatccttgatctggacacgggaagcacttgtcagactcaaaggacttgtaggaagtgcagggatatgcagcaaacccatcgggattgaggatgctttccaagtaatacttgtagcttcttaggtgattgcaagccacaaagtcccgggttcccgcccagatgccatctagatccacgatctgagacagggcattcttcttgcatcccggcatgctctctcctccattggggaangaagtcaagatgacccatctgttggttcgttccaaaacccaagaatgggatcaggggagctgcatccgtgtgaatcacatcaacaaagtcagcatcagagggat

SEQ ID NO: 3672 - DNA, 317 bp, Homo sapiens
acccttttgattcacggcatggccctatagttaattaagaggtggataacttaagctcacaactgcctttaatttgatttcacatccacagttataaactttgcatttaaaaggaaaatgagacatttaaataggttcctgttgtttcacatataattggtaaaaacatattcccttgtaggatcctattatcagagcatcaaataccaaagtcagcaacttgggttgccaaataaattaggctcattaattattttgaaaagggctgctgtttccatgtaaatgataattttctttttcatggacaaggttatggt

SEQ ID NO: 3673 - DNA, 511 bp, Homo sapiens
  misc_feature 353, 354, 418, 485: n = A,T,C or G
taattcacacggatggtgcccccatagtccccaatttggggtttggaatgagccaagtcgtgggccacctagatttctttccaaatggaggagtggaaatgcctggatgtaaaaagaacattctctctcagattgtggacatagacggaatctgggaagggactcgagactttgcggcctgtaatcacttaagaagctacaaatattacactgatagcatcgtcaaccctgatggctttgctggattcccctgtgcctcttacaacgtcttcactgcaaacaagtgtttcccttgtccaagtggaggctgcccacagatgggtcactatgctgatagatatcctgggaaaacnnatgatgtgggccagaaattttatctagacactggtgatgccagtaattttgcacgttggaggtntaaggtatctgtcacactgtctggaaaaaaggttacaggacacatactagtttctttgttcggaatnaaggaactctaagcagtatgaaattt

SEQ ID NO: 3674 - DNA, 331 bp, Homo sapiens; identical to SEQ ID NO: 3099

SEQ ID NO: 3675 - DNA, 592 bp, Homo sapiens
  misc_feature 537, 538, 552, 563, 579: n = A,T,C or G
atttacgtgctgaagttcagcacggggggcagtaagcgtccaaccatctggatcgacacgggcatccattcccgggagtgggtcacccaggccagtggggtctggtttgcaaagaagatcactcaagactacgggcaggatgcagctttcaccgccattctcgacaccttggacatcttcctggagatcgtcaccaaccctgatggctttgccttcacgcacagcacgaatcgcatgtggcgcaagactcggtcccacacagcaggctccctctgtattggcgtggactccaacaggaactgggacgctggctttgggttgtccggagccagcagtaacccctgctcggagacttaccacggcaagtttgccaattccgaagtggaggtcaagtccattgtagactttgtgaaggaccatgggaacatcaaggccttcatctccatccacagctactcccagctcctcatgtatccctatggctacaaaacagaaccagtccctgaccaggatgagctggatcagctttccaaggcnngctgtgacagcccntggcctctctntacgggaccaagttcnactatggcagcat

SEQ ID NO: 3676 - DNA, 496 bp, Homo sapiens
acgggcccggtgctgaagggcagggaacaacttgatggtgctactttgaactgcttttcttttctcctttttgcacaaagagtctcatgtctgatatttagacatgatgagctttgtgcaaaaggggagctggctacttctcgctctgcttcatcccactattattttggcacaacaggaagctgttgaaggaggatgttcccatcttggtcagtcctatgcggatagagatgtctggaagccagaaccatgccaaatatgtgtctgtgactcaggatccgttctctgcgatgacataatatgtgacgatcaagaattagactgccccaacccagaaattccatttggagaatgttgtgcagtttgcccacagcctccaactgctcctactcgccctcctaatggtcaaggacctcaaggccccaagggagatccaggccctcctggtattcctgggagaaatggtgaccctggtattccaggacaaccagggtcc

SEQ ID NO: 3677 - DNA, 554 bp, Homo sapiens
  misc_feature 511: n = A,T,C or G
gtctggtttgcaaagaagatcactcaagactacgggcaggatgcagctttcaccgccattctcgacaccttggacatcttcctggagatcgtcaccaaccctgatggctttgccttcacgcacagcacgaatcgcatgtggcgcaagactcggtcccacacagcaggctccctctgtattggcgtggaccccaacaggaactgggacgctggctttgggttgtccggagccagcagtaacccctgctcggagacttaccacggcaagtttgccaattccgaagtggaggtcaagtccattgtagactttgtgaaggaccatgggaacatcaaggccttcatctccatccacagctactcccagctcctcatgtatccctatggctacaaaacagaaccagtccctgaccaggatgagctggatcagctttccaaggctgctgtgacagccctggcctctctctacgggaccaagttcaactatggcagcatcatcaaggcaatttatcaangccagtggaagcactattgactggacctacagccagggcatca

SEQ ID NO: 3678 - DNA, 263 bp, Homo sapiens
actatctggtttgagagtgcccttgaaaatttcatactgcttagagtttcctttatttccgaacaaagaaactagtatgtgtcctgtaaccttttttccagacagtgtgacagataccttatacctccaacgtgcaaaattactggcatcaccagtgtctagataaaatttctggcccacatcatttgttttcccaggatatctatcagcatagtgacccatctgtgggcagcctccacttggacaagggaaacacttgtttg

SEQ ID NO: 3679 - DNA, 552 bp, Homo sapiens
  misc_feature 449, 461, 524: n = A,T,C or G
accaggtgtttcttaactctctccaagtccttcccacctccagaataccagcagaaaacacaaaagagaacttggtcacttcttcttgcctctcctcttatccttgcctttacctttgccttttgaatccttgctatcaactttgtctttaggcatcttgaaaccaccaatttctctccgtatcatagtgcctcgccaccaggcctggagctttataacgctctttaattccaagagatcctgttttaccttcttcttgctcctctccttttctatacgatcttcaatgatgacctgttcatactctcttatcatctttgccaggtcttgaaggtgtgctaagtcactggcctttgtggctttgagagcatttagttcattctgtttcatttctgtgtccttatcgtatttctccatccagaactccagcctctcctcaagtttctgcntgctcctttctnaggaacatttcaatctctgtatgagtccgggcctcttcttcggttttcatcctgagtttctgnaagaacaatcagataccagtacctcggc

SEQ ID NO: 3680 - DNA, 331 bp, Homo sapiens; identical to SEQ ID NO: 3099

SEQ ID NO: 3681 - DNA, 411 bp, Homo sapiens
actgaatgtcatctgcatggtcggcccccacccatttggggtagacgggcatccgagagggatgggaaaacaggtaggcgtaggtcttggcactcttggcattggctctgtgctgggctagggcaatctcggtgggcaccaggaagaggacatcggtctcaaagtccaccacagtcttcttcttattctcctgggatgggtcctgggcccaggactcagtgtagacatcaaaggtcgtcttggcgcctctgagccccttggtgattgtgaactcactgaccagcttgtagaagtcctcctccgtgactttcttgttgcccttgttgatggcaggcatgtcgatgctggcgaagatgtggccgtccatgttgttggtgcctgctatatagtcgatgtcggcggcgttggcgt

SEQ ID NO: 3682 - DNA, 514 bp, Homo sapiens
gttcagcacggggggcagtaagcgtccagccatctggatcgacacgggcatccattcccgggagtgggtcacccaggccagtggggtctggtttgcaaagaagatcactcaagactacgggcaggatgcagctttcaccgccactctcgacaccttggacatcttcctggagatcgtcaccaaccctgatggctttgccttcacgcacagcacgaatcgcatgtggcgcaagactcggtcccacacagcaggctccctctgtattggcgtggaccccaacaggaactgggacgctggctttgggttgtccggagccagcagtaacccctgctcggagacttaccacggcaagtttgccaattccgaagtggaggtcaagtccattgtagactttgtgaaggaccatgggaacatcaaggccttcatctccatccacagctactcccagctcctcatgtatccctatggctacaaaacagaaccagtccctgaccaggatgagctggatcagctt

SEQ ID NO: 3683 - DNA, 476 bp, Homo sapiens
ttcacacggatggtgcccccatagtccccaatttggggtttggaatgagccaagtcgtgggccacctagatttctttccaaatggaggagtggaaatgcctggatgtaaaaagaacattctctctcagattgtggacatagacggaatctggggagggactcgagactttgcggcctgtaatcacttaagaagctacaaatattacactgatagcatcgtcaaccctgatggctttgctggattcccctgtgcctcttacaacgtcttcactgcaaacaagtgtttcccttgtccaagtggaggctgcccacagatgggtcactatgctgatagatatcctgggaaaacaaatgatgtgggccagaagttttatctagacactggtgatgccagtaattttgcacgttggaggtataaggtatctgtcacactgtctggaaaaaaggttacaggacacatactagtttctttgttc

SEQ ID NO: 3684 - DNA, 230 bp, Homo sapiens
acaacaagtgggaaacgatagaggcttggactcaacaagtcgccactgagaatccagccctcatctctcgcagtgttatcggaaccacatttgagggacgcgctatttacctcctgaaggttggcaaagctggacaaaataagcctgccattttcatggactgtggtttccatgccagagagtggatttctcctgcattctgccaatggtttgtaagagaggctgttcgg

SEQ ID NO: 3685 - DNA, 436 bp, Homo sapiens
  misc_feature 400, 430, 432: n = A,T,C or G
ctacgggcaggatgcagctttcaccgccattctcgacaccttggacatcttcctggagatcgtcaccaaccctgatggctttgccttcacgcacagcacgaatcgcatgtggcgcaagactcggtcccacacagcaggctccctctgtattggcgtggaccccaacaggaactgggacgctggctttgggttgtccggagccagcagtaacccctgctcggagacttaccacggcaagtttgccaattccgaagtggaggtcaagtccattgtagactttgtgaaggaccatgggaacatcaaggccttcatctccatccacagctactcccagctcctcatgtatccctatggctacaaaacagaaccagtccctgaccaggatgagctggatcagctnttccaaggctgctgtgacagccctggcctntntcta

SEQ ID NO: 3686 - DNA, 184 bp, Homo sapiens
actgtgaggtttgatttgtgtgacagaatctggcttccagaagtcaatctgggtcgtgctggccaactcgcggattatgttaatgtgattttcatcttcaacgttaacacggaacaccttctcgccttcaaagtgctcaccaccatgatgagcagatgccagggccacagtcaccagaaccaag

SEQ ID NO: 3687 - DNA, 265 bp, Homo sapiens
  misc_feature 254: n = A,T,C or G
actcattccaatgaatttgactcagatgtggatgttggggacttgcagatggttaaatttatttggtataacaatgtgatcaacccaactttacctagagtgggagcatccaagattatagtggagacaaatgttggaaaacagttcaacttctgtagtccagaaaccgtcagggaggaagttctgctcaccctcacaccgtgttaggagactactgttatttgaccaatgaattgacttctaataaaatctantggtgatgcat

SEQ ID NO: 3688 - DNA, 576 bp, Homo sapiens
actatctggtttgagagtgcccttgaaaatttcatactgcttagagtttcctttatttccgaacaaagaaactagtatgtgtcctgtaaccttttttccagacagtgtgacagataccttatacctccaacgtgcaaaattactggcatcaccagtgtctagataaaatttctggcccacatcatttgttttcccaggatatctatcagcatagtgacccatctgtgggcagcctccacttggacaagggaaacacttgtttgcagtgaagacgttgtaagaggcacaggggaatccagcaaagccatcagggttgacgatgctatcagtgtaatatttgtagcttcttaagtgattacaggccgcaaagtctcgagtcccttcccagattccgtctatgtccacaatctgagagagaatgttctttttacatccaggcatttccactcctccatttggaaagaaatctaggtggcccacgacttggctcattccaaaccccaaattggggactatgggggcaccatccgtgtgaattacatccacaaatttggcatcgctggggtccaatcggac

SEQ ID NO: 3689 - DNA, 236 bp, Homo sapiens
gcaggtacgaacagcctctcttacaaaccactggcagaatgcaggagaaatccactctctggcatggaaaccacagtccatgaaaatggcaggcttattttgtccagctttgccaaccttcaggaggtaaatagcgcgtccctcaaatgtggttccgataacactgcgagagatgagggctggattctcagtggcgacttgttgagtccaagcctctatcgtttcccacttgttgt

SEQ ID NO: 3690 - DNA, 230 bp, Homo sapiens; identical to SEQ ID NO: 3096

SEQ ID NO: 3691 - DNA, 482 bp, Homo sapiens
acctgggaagagtattttgaaaccttcatcaatggaaaagtggtttggggttcctggtttgaccacgtgaaaggatggtgggagatgaaagacagacaccagattctcttcctcttctatgaggacataaagagggacccaaagcatgaaattcggaaggtgatgcagttcatgggaaagaaggtggatgaaacagtgctagataaaattgtccaggagacgtcatttgagaaaatgaaagaaaatcccatgacaaatcgttctacagtttccaaatctatcttggaccagtcaatttcctccttcatgagaaaaggaactgtgggggattggaaaaaccacttcactgttgcccagaatgagaggtttgatgaaatctatagaagaaagatggaaggaacctccataaacttctgcatggaactctgagcaagatgtaaataaaattaaaaggtggatggcaagagtgcaaatactatctt

SEQ ID NO: 3692 - DNA, 198 bp, Homo sapiens
  misc_feature 150: n = A,T,C or G
acaatgttggcactcttggttctggtgactgtggccctggcatctgctcatcatggtggtgagcactttgaaggcgagaaggtgttccgtgttaacgttgaagatgaaaatcacattaacataatccgcgagttggccagcacgacccanattgacttctggaagccagattctgtcacacaaatcaaacctcacagt

SEQ ID NO: 3693 - DNA, 511 bp, Homo sapiens
  misc_feature 35, 41, 69, 279, 291, 426, 455, 469, 491, 496: n = A,T,C or G
acaagctttttttttttttttttttttttttttgntttaantataaactttattcctgaatatcttcanatactttctgctagttcaaataaactcacacagacattaatccaatttgaataactacatatgaatgaggctacagtattattcaatccaaagtgtgtcacttccgttcatgaaggcttgctatgcataaatataaaaatattttatcttctgatgctttcatttttgaagcactcccttcaaaggatgtaaaaaaatattaaataaaanagctttcaaagngttctgttaggctatgatttgagggggagatgaatggaaatggatattgatagttatttaactggaaatctttgtggtgatatgtgaaagtataaactaactccaacaaactcgttttttcctgaaacttttggngtaaaattatatattattattattttganacagggtcttgctntgttgcccaagccaggctggantgcantggcatgacctcggc

SEQ ID NO: 3694 - DNA, 546 bp, Homo sapiens
acagcattctggaataaagcaagagtgttcattcacacacacagtagcttcaaaactgttcgatctgtttgttcccatgtagttttctaaagatggaaaaaaaggactttggtcatcaagactactgtggccatattagattactggaacatctaagcatcagtgtgtgaccatgcgaacaaaagacttcggggagtgtctatttttaaaaaggtttatgtgtgtcgaggcagttgtaaaagatttactgcagaatcaagcccacttttaggcttaggaccaggttctaactatctaaaaatattgactgataacaaaaagtgttctaaatgtggctattctgatccatagttgttttttaaagaaaaaaaatgtatatacagaaagagtataaaagtttgtgaatttaatgcaaattagcttccagtcttcacttcccaaatacttgatttatagttttgactcctttacatttttgccttcttaatttcaagatttgcaattttgccttcaaaacagatcattttttttaattgtaaaagtatt

SEQ ID NO: 3695 - DNA, 527 bp, Homo sapiens; identical to SEQ ID NO: 3116

SEQ ID NO: 3696 - DNA, 207 bp, Homo sapiens; identical to SEQ ID NO: 2996

SEQ ID NO: 3697 - DNA, 490 bp, Homo sapiens
  misc_feature 287, 451, 453, 489: n = A,T,C or G
acacaagggtcagtttcttcaattcatgagcagtcagaacaggagatgcttaggaaggaatcgtggctggtgcctcttctccatgctcatcccataccccagtgacaggataccgcttccctgaagttaaaaacatgcaccacacttccggtaaaggctggagccacagagggcacctagcaagcttgctttcaaggtcccatcaacaaatgagaagggcagccgaggacagattgacagaaaccccactatgttgcttttctttttttttttttttttttcctganacagagtcttgctctgttgcccaggctggagtgcaatggcacaatctcaactcactgcaacctccaccccctgagttcgagcaattctcctgccttggcctcccgagtagctgggattacaggcgcctgccaccatgcctggctaatttttgtatttttagtananacggagtttcagcattttggccaggctgattttganc

SEQ ID NO: 3698 - DNA, 429 bp, Homo sapiens
acatcgcagcctttgctgtctcggcctactcctccacataccaccgagccggctgcaaacccttcaaccctgtcctgggggagacctacgagtgtgagcggcctgaccgaggcttctgcttcatcagtgagcaggtctcccaccacccccctatctcggcctgccatgcagagtctgagaacttcgccttctggcaagatatgaagtggaagaacaagttctggggcaaatccctggagattgtgcctgtgggaacagtcaacgtcagcctgcccaggtttggggaccactttgagtggaacaaggtgacatcctgcattcacaatgtcctgagtggtcagcgctggatcgagcactatggggaggtgctcatccgaaacacacaggacagctcctgccactgcaagatcaccttctgcaaggccaagt

SEQ ID NO: 3699 - DNA, 534 bp, Homo sapiens
  misc_feature 531: n = A,T,C or G
gcagattcatcaagcatcagtggctccaatttcaaaacaaatagaaaaactcgctttattattcatggattcatagacaagggagaagaaaactggctggccaatgtgtgcaagaatctgttcaaggtggaaagtgtgaactgtatctgtgtggactggaaaggtggctcccgaactggatacacacaagcctcgcagaacatcaggatcgtgggagcagaagtggcatattttgttgaatttcttcagtcggcgttcggttactcaccttccaacgtgcatgtcattggccacagcctgggtgcccacgctgctggggaggctggaaggagaaccaatgggaccattggacgcatcacagggttggacccagcagaaccttgctttcagggcacacctgaattagtccgattggaccccagcgatgccaaatttgtggatgtaattcacacggatggtgcccccatagtccccaatttggggtttgggatgagccaagtcgtgggccacctagatttctttccaatggangag

SEQ ID NO: 3700 - DNA, 511 bp, Homo sapiens
accagggggaccgggagggcctggggggccagctggtccaggatagcctgcgagtcctcctactgctactccagacttgacatcatatgaatcatactggggagaatagttctgaggaccagtagggcatgattcacagattccaggggggccaggagaaccaggggaccctggttgtcctggaataccagggtcaccatttctcccaggaataccaggagggcctggatctcccttggggccttgaggtccttgaccattaggagggcgagtaggagcagttggaggctgtgggcaaactgcacaacattctccaaatggaatttctgggttggggcagtctaattcttgatcgtcacatattatgtcatcgcagagaacggatcctgagtcacagacacatatttggcatggttctggcttccagacatctctatccgcataggactgaccaagatgggaacatcctccttcaacagcttcctgttgtgccaaaataatagtgggatga

SEQ ID NO: 3701 - DNA, 461 bp, Homo sapiens
acaaaaatgacaagcattcttatacaccaataacagacaaacagagagccaaatcatcagtgaactcccattcacaattgcttcaaagagaataaaatacctaggaatccaacttacaagggacgtgaaggacctcttcaaggagaactacaaaccactgctcagtgaaataaaagaggatacaaagaaatggaagaacattccacgttcatgggtaggaagaaccaatattgtgaaaatggccatactgcccaaggtaatttatagattcaatgccacccccatcaagctaccaatgactttcttcacagaattggaaaaaactgctttaaagttcatatggaaccaaaaaagagcccgcatcaccaagtcaatcctaagccaaaagaacaaagctggaggcatcacgctacctgacttcaaactatactacaaggctacagtaaccaaaacagcatggt

SEQ ID NO: 3702 - DNA, 526 bp, Homo sapiens
  misc_feature 450: n = A,T,C or G
acacaatggtttattaaaggaatgtatggcccacatcaacctagcaaggattctactggtaaaccttcctatggccaaaggaaaaacaagcaggagttgagtggctggggtggggtgcaggcaatggagagagggcagaagggtgtagaagctgaaggggtctagaagcttactcctgagtttcttccttctgtcttcaaatctttacttcttatggccaaagacccagctgtttcataggctggagatgcactcttctagactgctcgagacagccagagacaggggaggagggaagaaggatactgtggaaagggatggcggggcaaacatttagagctagaagccactactgggccaatgctaaagtttctgtctctaagcctaaaaaagccagtgtagtagggcccttatcactcttagtttgctaggtttcccctctgaaataantgagcagatttagccaggctagcagaaaggaagaggacggggctgtgcaggagttagcagaatcttgattcttgct

SEQ ID NO: 3703 - DNA, 65 bp, Homo sapiens
acaacaagtgggaaacgatagaggcttggactcaacaagtcgccactgagatcaccctatcttcc

SEQ ID NO: 3704 - DNA, 455 bp, Homo sapiens; identical to SEQ ID NO: 3364

SEQ ID NO: 3705 - DNA, 331 bp, Homo sapiens
acctatggacgtgagatccaagtgacagagcttctcgacaagttagacttttatgtcctgcctgtgctcaatattgatggctacatctacacctggaccaagagccgattttggagaaagactcgctccacccatactggatctagctgcattggcacagaccccaacagaaattttgatgctggttggtgcgaaattggagcctctcgaaacccctgtgatgaaacttactgtggacctgccgcagagtctgaaaaggagaccaaggccctggctgatttcatccgcaacaaactctcttccatcaaggcatatctgacaatccactcgt

SEQ ID NO: 3706 - DNA, 504 bp, Homo sapiens
accaagcaatgaagaacaaattaaaaatctgctacaattggaggctcaagaacatctccagcttgatttttggaaatcacccaccaccccaggggagacagcccacgtccgagttcccttcgtcaacgtccaggcagtcaaagtgttcttggagtcccagggaattgcctattccatcatgattgaagacgtgcaggtcctgttggacaaagagaatgaagaaatgctttttaataggagaagagaacggagtggtaacttcaattttggggcctaccataccctggaagagatttcccaagaaatggataacctcgtggctgagcaccctggtctagtgagcaaagtgaatattggctcttcttttgagaaccggcctatgaacgtgctcaagttcagcaccggaggagacaagccagctatctggctggatgctgggatccatgctcgagagtgggttacacaagctacggcactttggacagcaaataagattgtttctga

SEQ ID NO: 3707 - DNA, 80 bp, Homo sapiens; identical to SEQ ID NO: 3121

SEQ ID NO: 3708 - DNA, 207 bp, Homo sapiens; identical to SEQ ID NO: 2996

SEQ ID NO: 3709 - DNA, 548 bp, Homo sapiens
  misc_feature 534: n = A,T,C or G
actgaagatcagcgatgcaaactcattagggaggagatggtctgaactgagttggagacatagtctagtttaatttttgacttcatagtaattgcaggaccagttctagacatccatttttcagcttcctctagtttttgaacttgcaaacaaaggagaacttcttctcacaagattcatccttccatttcttgaatcctgagcatgaagtcaggcttgcacagtagccagcattagcactgctcggggatccagtgtcccaggacttgtaggagaccagggacccactactccagtgccagcggcggttcttttttgggtcatggaggccaatccagacattgctgtcatcagtgctactctccttaatcagtgaggccacgaaggcaccctccacctgggtgagcacagacaccaggttgcctgaattcatgttctggcaatagagatctgcatcaacccaggtctcagggtcttcattaaagtagtagcagtaggagcgataggcattggtgccttctgggcagctgattncggggattaggcag

SEQ ID NO: 3710 - DNA, 458 bp, Homo sapiens
ctctgtctgacctgacaagccacctcaagtggacaaggcacttaccaacagagattgctgatttgctccttaagcaagagattcactgccgctaagcatggctcagaccaactcgttcttcatgctgatctcctccctgatgttcctgtctctgagccaaggccaggagtcccagacagagctgcctaatccccgaatcagctgcccagaaggcaccaatgcctatcgctcctactgctactactttaatgaagaccctgagacctgggttgatgcagatctctattgccagaacatgaattcaggcaacctggtgtctgtgctcacccaggcggagggtgccttcgtggcctcactgattaaggagagtagcactgatgacagcaatgtctggattggcctccatgacccaaaaagaaccgccgctggcactggagtagtgggtccctggtctccta

SEQ ID NO: 3711 - DNA, 331 bp, Homo sapiens; identical to SEQ ID NO: 3009

SEQ ID NO: 3712 - DNA, 331 bp, Homo sapiens; identical to SEQ ID NO: 3099

SEQ ID NO: 3713 - DNA, 213 bp, Homo sapiens; identical to SEQ ID NO: 3148

SEQ ID NO: 3714 - DNA, 331 bp, Homo sapiens; identical to SEQ ID NO: 2994

SEQ ID NO: 3715 - DNA, 465 bp, Homo sapiens
acagtgtggcagtggaggccgtcagattactgatacttatacttaagtgagtcctgggaagaggggaggccagtgtctcagacctttgcccttccagggtcatctccctccacctgtcacagctgactcttccatctgtgcaggttgactgaggtcattcctgagttgcagtatgttgagagggtaatatttctgtcttctctaactccccatactcccttgtcttccactctccatttaggagttttttgtgagttatgtccttgttgcttttgcctctttttctttctagccttgattgtgccagaagacaatgtccctattcacacactctttctgcttttctgtgggcaggaacatgggaggggtgctgatggacgtggactgtgagagcgtctaccccattgtgtaggcctctaattgaggcctggcctctgctgtgggtgaatttctgtacctcggccg

SEQ ID NO: 3716 - DNA, 340 bp, Homo sapiens
actcactcactacactctaattttcaccctgtaagagaaatcatgggctgatgtgatctgtcatggcactgagctgtgccctccgtaggggaggagcaatgcaggtaaagtgaatctctttgtgttaccctctttaatgcatccatcctctgatgttttactccagtgatgtgctggaacgtcaccattggagttagtctcatccatgggtaattgtcaaaattgatgcttctggaagggaaatggtggtagaaagctcctattcttccaccttgctaatatcactcaggacttctagtttgttggcagcattcctaattgtgttctgttttttttacaa

SEQ ID NO: 3717 - DNA, 322 bp, Homo sapiens
acttgatgccctggctgtaggtccagtcaatagtgcttccactggcttgataaattgccttgatgatgctgccatagttgaacttggtcccgtagagagaggccagggctgtcacagcagccttggaaagctgatccagctcatcctggtcagggactggttctgttttgtagccatagggatacatgaggagctgggagtagctgtggatggagatgaaggccttgatgttcccatggtccttcacaaagtctacaatggacttgacctccacttcggaattggcaaacttgccgtggtaagtctccgagcaggggttact

SEQ ID NO: 3718 - DNA, 589 bp, Homo sapiens
ctgccacgatgctgccactttggactctttcactgctgctgggagcagtagcaggaaaagaagtttgctacgaaagactcggctgcttcagtgatgactccccatggtcaggaattacggaaagacccctccatatattgccttggtctccaaaagatgtcaacacccgcttcctcctatatactaatgagaacccaaacaactttcaagaagttgccgcagattcatcaagcatcagtggctccaatttcaaaacaaatagaaaaactcgctttattattcatggattcatagacaagggagaagaaaactggctggccaatgtgtgcaagaatctgttcaaggtggaaagtgtgaactgtatctgtgtggactggaaaggtggctcccgaactggatacacacaagcctcgcagaacatcaggatcgtgggagcagaagtggcatattttgttgaatttcttcagtcggcgttcggttactcaccttccaacgtgcatgtcattggccacagcctgggtgcccacgctgctggggaggctggaaggagaaccaatgggaccattggacgcatcacagggttggaccc

SEQ ID NO: 3719 - DNA, 193 bp, Homo sapiens
gttggcactcttggttctggtgactgtggccctggcatctgctcatcatggtggtgagcactttgaaggcgagaaggtgttccgtgttaacgttgaagatgaaaatcacattaacataatccgcgagttggccagcacgacccagattgacttctggaagccagattctgtcacacaaatcaaacctcacagt

SEQ ID NO: 3720 - DNA, 258 bp, Homo sapiens
  misc_feature 91, 126, 174, 179, 181, 209, 221, 236, 245: n = A,T,C or G
acaagcttttttttttttttttttttttttttttatttacaactgcacaaaggctgtattgcaggggaggtgggagggggcaggcaaaacnctcctcctcctgggtcttggggccccggagcaaancccagggatgggctgagtgaggggcttggcactctgtggaagctgcanatgananaccagcaatgcatcagctgcacctgcantaaagcgcgganatagcgttggaccantctcctaanatgccccggcggt

SEQ ID NO: 3721 - DNA, 546 bp, Homo sapiens
actatctggtttgagagtgcccttgaaaatttcatactgcttagagtttcctttatttccgaacaaagaaactagtatgtgtcctgtaaccttttttccagacagtgtgacagataccttatacctccaacgtgcaaaattactggcatcaccagtgtctagataaaatttctggcccacatcatttgttttcccaggatatctatcagcatagtgacccatctgtgggcagcctccacttggacaagggaaacacttgtttgcagtgaagacgttgtaagaggcacaggggaatccagcaaagccatcagggttgacgatgctatcagtgtaatatttgtagcttcttaagtgattacaggccgcaaagtctcgagtcccttcccagattccgtctatgtccacaatctgagagagaatgttctttttacatccaggcatttccactcctccatttggaaagaaatctaggtggcccacgacttggctcattccaaaccccaaattggggactatgggggcaccatccgtgtgaattacatccac

SEQ ID NO: 3722 - DNA, 331 bp, Homo sapiens; identical to SEQ ID NO: 3099

SEQ ID NO: 3723 - DNA, 512 bp, Homo sapiens
  misc_feature 503: n = A,T,C or G
acatggcctcaggttaaaaatggtgccttgagaagtgtgatcctcttagaccctgaactggtttggggagtggggaatggagtatgaagtgaaaggaggagtttggtttgtagagtttgagatgccagagggccatccaagtggaaagataatcaccagacaataggaaatgcaaagttgaagcttgagccaggctggagtcattgattcaggagctgtctatgagttgaagctatacaagtggattaataaaaggataacctcaagaagcaaatgattttagggcttcttttttcgttgaatttagaaaagaatcaagttaacaggaaaaggtggttcacatctgaaatttggtatttaactgcattttagacccactaaaaaagctaaaaatagttgatgaagtttggagaagttatgctgaaggttatttgggtccccgtctaaaccatgctgtctggattcacattcgctttcctattcttggattccataacataatnccatcttgt

SEQ ID NO: 3724 - DNA, 537 bp, Homo sapiens
  misc_feature 497: n = A,T,C or G
cggaactgccacgatgctgccactttggactctttcactgctgctgggagcagtagcaggaaaagaagtttgctacgaaagactcggctgcttcagtgatgactccccatggtcaggaattacggaaagacccctccatatattgccttggtctccaaaagatgtcaacacccgcttcctcctatatactaatgagaacccaaacaactttcaagaagttgccgcagattcatcaagcatcagtggctccaatttcaaaacaaatagaaaaactcgctttattattcatggattcatagacaagggagaagaaaactggctggccaatgtgtgcaagaatctgttcaaggtggaaagtgtgaactgtatctgtgtggactggaaaggtggctcccgaactggatacacacaagcctcgcagaacatcaggatcgtgggagcagaagtggcatattttgttgaatttcttcagtcggcgttcggttactcaccttccnacgtgcatgtcattggccacagcctgggtgcccacgctgc

SEQ ID NO: 3725 - DNA, 267 bp, Homo sapiens
ccgagatcgcgccactgtgctccagcctgggcaacagagcaagactccatctcaaaaaataaaaataaataaaaaataaaaaaataaaagagcaaactatttccaaataccatagaataacttacataaaagtaatataactgtattgtaagtagaagctagcactggttttattaatttagtgactattcattttatctaaatcagtgaagatttactgtcattgtttattagtctgtatatattaaaatatgatatcattaatgt

SEQ ID NO: 3726 - DNA, 294 bp, Homo sapiens
  misc_feature 43, 68, 72, 79, 86, 105, 124, 130, 140, 151, 156, 166, 179,188, 208, 221, 232, 246, 265: n = A,T,C or G
acaagcttttttttttttttttttttttttttttttttatggnttgcaggaggcctttaattgtgaanagcncaatcanaaaacanatatgctggtcaaggaggnggccagcccgggagatgcnctggancaggggaaanatgcccctgcncctantggcctacancattctgggctangtgtgggantgggtgggcagtctcactgnttggagcgtccancgtcatggcanatgccaaagttggngttggtgatggagcccacnatggtcttgtctccctcacaggtcaggcc

SEQ ID NO: 3727 - DNA, 411 bp, Homo sapiens; identical to SEQ ID NO: 3218

SEQ ID NO: 3728 - DNA, 331 bp, Homo sapiens; identical to SEQ ID NO: 2994

SEQ ID NO: 3729 - DNA, 230 bp, Homo sapiens; identical to SEQ ID NO: 3181

SEQ ID NO: 3730 - DNA, 193 bp, Homo sapiens
gtcctgaagatcgccaaggtcttcaagaaccccaagttcagcattctgaccgtgaacaatgacatcatcctgctgaagctggccacacctgcccgcttctcccagacagtgtccgccgtgtgcctgcccagcgccgacgacgacttccccgcggggacactgtgtgccaccacaggctggggcaagaccaagt

SEQ ID NO: 3731 - DNA, 523 bp, Homo sapiens
  misc_feature 460: n = A,T,C or G
acatttcatggcattccatcacttataataagaatggatgccaaagaacaaagccaaaattagctgacaatgttataaaacaaaagcaaagtatacacactctatacacacgtatacctgcactcagcctgctgagtatttaaataacatccccaaatatccatatgtggactttggctggcctagagactttcaagaatattttgcaccttttctcaaaatacttttttttaaagaaaatgaactgtaacacaactactcatctccttacttatatcagtccctcccttccaccctccccactggggaaaaaactgttggggaatctgctagagaactggtatctgacagcaaactaagccgtggggtaaactaaaaagggactctgggtagaggaaaaaaatctaacctcccatatgtgaatgagagtatgagctaatacttcccaagaatgctaggnatgtgaccttcataatggaagcacagacttatgattatagttagagtcaaaagaaaacagtct

SEQ ID NO: 3732 - DNA, 459 bp, Homo sapiens
actatctggtttgagagtgcccttgaaaatttcatactgcttagagtttcctttatttccgaacaaagaaactagtatgtgtcctgtaaccttttttccagacagtgtgaaggataccttatacctccaacgtgcaaaattactggcatcaccagtgtccagataaaatttctggcccacatcatttgttttcccaggatatctatcagcatagtgacccatctgtgggcagcctccacttggacaagggaaacacttgtttgcagtgaagacgttgtaagaggcacaggggaatccagcaaagccatcagggttgacgatgctatcagtgtaatatttgtagcttcttaagtgattacaggccgcaaagtctcgagtcccttcccagattccgtctatgtccacaatctgagagagaatgttctttttacatccaggcatttccactcctccatttgg

SEQ ID NO: 3733 - DNA, 213 bp, Homo sapiens; identical to SEQ ID NO: 3345

SEQ ID NO: 3734 - DNA, 479 bp, Homo sapiens
ggcatattttgttgaatttcttcagtcggcgttcggttactcaccttccaacgtgcatgtcattggccacagcctgggtgcccacgctgctggggaggctggaaggagaaccaatgggaccattggacgcatcacagggttggacccagcagaaccttgctttcagggcacacctgaattagtccgattggaccccagcgatgccaaatttgtggatgtaattcacacggatggtgcccccatagtccccaatttggggtttggaatgagccaagtcgtgggccacctagatttctttccaaatggaggagtggaaatgcctggatgtaaaaagaacattctctctcagattgtggacatagacggaatctgggaagggactcgagactttgcggcctgtaatcacttaagaagctacaaatattacactgatagcatcgtcaaccctgatggctttgctggattcccctgtgcctctt

SEQ ID NO: 3735 - DNA, 300 bp, Homo sapiens
actgaagatcagcgatgcaaactcattagggaggagatggtctgaactgagttggagacatagtctagtttaatttttgacttcatagtaattgcaggaccagttctagacatccatttttcagcttcctctagtttttgaacttgcaaacaaaggagaacttcttctcacaagattcatccttccatttcttgaatcctgagcatgaagtcaggcttgcacagtagccagcattagcactgctcggggatccagtgtcccaggacttgtaggagaccagggacccactactccagtgcc

SEQ ID NO: 3736 - DNA, 212 bp, Homo sapiens
acactcaaactttatttggttgcctggatggggccagagaggaggacaagaagggtgtcaaagggtcagctcagtaggggtgattcagggtgtgctccatgatggtcagaagcgccagccacgtctcctcggctgtggggatgatctgggaggctggcagcaggaagccatagcgcccagtgtcccggagctcgaaggtgaaggagtacctg

SEQ ID NO: 3737 - DNA, 269 bp, Homo sapiens
aaaactcatgatgctccggctgctcagttccctcctccttgtggccgttgcctcaggctatggcccaccttcctctcgcccttccagccgcgttgtcaatggtgaggatgcggtcccctacagctggccctggcaggtttccctgcagtatgagaaaagtggaagcttctaccacacgtgtggcggtagcctcatcgcccccgactgggttgtgactgccggccactgcatctcaagctcctggacctaccaggtggtgttgggcgagt

SEQ ID NO: 3738 - DNA, 331 bp, Homo sapiens; identical to SEQ ID NO: 3099

SEQ ID NO: 3739 - DNA, 453 bp, Homo sapiens
actgaagatcagcgatgcaaactcattagggaggagatggtctgaactgagttggagacatagtctagtttaatttttgacttcatagtaattgcaggaccagttctagacatccatttttcagcttcctctagtttttgaacttgcaaacaaaggagaacttcttctcacaagattcatccttccatttcttgaatcctgagcatgaagtcaggcttgcacagtagccagcattagcactgctcggggatccagtgtcccaggacttgtaggagaccagggacccactactccagtgccagcggcggttcttttttgggtcatggaggccaatccagacattgctgtcatcagtgctactctccttaatcagtgaggccacgaaggcaccctccgcctgggtgagcacagacaccaggttgcctgaattcatgttctggcaatagagatctg

SEQ ID NO: 3740 - DNA, 533 bp, Homo sapiens; identical to SEQ ID NO: 3391

SEQ ID NO: 3741 - DNA, 454 bp, Homo sapiens
  misc_feature 427: n = A,T,C or G
accagggggaccgggagggcctggggggccagctggtccaggatagcctgcgagtcctcctactgctactccagacttgacatcatatgaatcatactggggagaatagttctgaggaccagtagggcatgattcacagattccaggggggccaggagaaccaggggaccctggttgtcctggaataccagggtcaccatttctcccaggaataccaggagggcctggatctcccttggggccttgaggtccttgaccattaggagggcgagtaggagcagttggaggctgtgggcaaactgcacaacattctccaaatggaatttctgggttggggcagtctaattcttgatcgtcacatattatgtcatcgcagagaacggatcctgagtcacagacacatatttggcatggttctggcttccanacatctctatccgcataggactgacca

SEQ ID NO: 3742 - DNA, 222 bp, Homo sapiens
  misc_feature 52: n = A,T,C or G
acattgcccgggacccgtgcctccagtccacacagatgcagttcaccttctncacttcaaacattttcttgcacatgtccgatggcccgctgtcctccgccttgtctaagaagccatggatgatgaagcgtgtcttgcggtccagttggaagtttgaagcctcaatggtgtctggttccgtgccagtgattagttggaagttgtttggattttcatttgtgt

SEQ ID NO: 3743 - DNA, 243 bp, Homo sapiens; identical to SEQ ID NO: 3638

SEQ ID NO: 3744 - DNA, 230 bp, Homo sapiens; identical to SEQ ID NO: 3096

SEQ ID NO: 3745 - DNA, 93 bp, Homo sapiens
ttccaataatgtgacttcttaaaagttttattaaaggggaggggcaaatattggcaattagttggcagtggcctgttacggttgggattggtg

SEQ ID NO: 3746 - DNA, 184 bp, Homo sapiens
actgtgaggtttgatttgtgtgacagaatctggcttccagaagccaatctgggtcgtgctggccaactcgcggattatgttaatgtgattttcatcttcaacgttaacacggaacaccttctcgccttcaaagtgctcaccaccatgatgagcagatgccagggccacagtcaccagaaccaag

SEQ ID NO: 3747 - DNA, 438 bp, Homo sapiens
cctggatgtaaaaagaacattctctctcagattgtggacatagacggaatctgggaagggactcgagactttgcggcctgcaatcacttaagaagctacaaatattacactgatagcatcgtcaaccctgatggctttgctggattcccctgtgcctcttacaacgtcttcactgcaaacaagtgtttcccttgtccaagtggaggctgcccacagatgggtcactatgctgatagatatcctgggaaaacaaatgatgtgggccagaaattttatctagacactggtgatgccagtaattttgcacgttggaggtataaggtatctgtcacactgtctggaaaaaaggttacaggacacatactagtttctttgttcggaaataaaggaaactctaagcagtatgaaattttcaagggcactctcaaaccagatagt

SEQ ID NO: 3748 - DNA, 485 bp, Homo sapiens
  misc_feature 466, 467: n = A,T,C or G
actatctggtttgagagtgcccttgaaaatttcatactgcttagagtttcctttatttccgaacaaagaaactagtatgtgtcctgtaaccttttttccagacagtgtgacagataccttatacctccaacgtgcaaaattactggcatcaccagtgtctagataaaatttctggcccacatcatttgttttcccaggatatctatcagcatagtgacccatctgtgggcagcctccacttggacaagggaaacacttgtttgcagtgaagacgttgtaagaggcacaggggaatccagcaaagccatcagggttgacgatgctatcagtgtaatatttgtagcttcttaagtgattacaggccgcaaagtctcgagtcccttcccagattccgtctatgtccacaatctgagagagaatgttctttttacatccaggcatttccactcctccatttggaaagaannctaggtggcccacgactt

SEQ ID NO: 3749 - DNA, 258 bp, Homo sapiens
tgctagctgtgctgctcacagtggccgccgccgacagcggcatcagccctcgggccgtgtggcagttccgcaaaatgatcaagtgcgtgatcccggggagtgaccccttcttggaatacaacaactacggctgctactgtggcttggggggctcaggcacccccgtggatgaactggacaagtgctgccagacacatgacaactgctatgaccaggccaagaagctggacggctgtaaatttctgctggacaacccgt

SEQ ID NO: 3750 - DNA, 164 bp, Homo sapiens
accagccgctcatgtttttatcgcacccctgggaccctgctgagttctctgtgcttcggaagggttcatccaggagggtgtaattctgacaggggtcaaaacagacatgagcctctggggtgccaggagctccgcagtccaggtccagcccatacgaactggct

SEQ ID NO: 3751 - DNA, 483 bp, Homo sapiens
  misc_feature 412: n = A,T,C or G
acagcaaccatctgcagttagtctgacttgagtttcatagctgtccgggggacacgcggtctgctgaacaggagggcattccacagtcctgcagtccacgccgaaaactggtttgcactcatagaggtcacagcactctcccggcttccctgaggcttttgacactagtatgttcaggtttcccggctggcagactttgcgcagacagcctgcggggttgcacacgcagcggctgggtaagggacagcactccccaggaggagcataaccctcgatcagaacagaatcttcaggacaacgtggagagaactggacttcacagcgggccttggagcaatctggcttctcttcttcaattctctttaaagctgaaaggcacatatcctgacttggaaactcaaagggattgctncaggttcgaatggtgttacattcacatttcccattgattatattgcagccagcaataaggttttcattgca

SEQ ID NO: 3752 - DNA, 341 bp, Homo sapiens
actcactcactacactctaattttcaccctgtaagagaaatcatgggctgatgtgatctgtcatggcactgagctgtgccctccgtaggggaggagcaatgcaggtaaagtgaatctctttgtgttaccctctttaatgcatccattctctgatgttttactccagtgatgtgctggaacgtcaccattggagttagtctcatccatgggtaattgtcaaaattgatgcttctggaagggaaatgatggtagaaagctcctattcttccaccttgctaatatcactcaggacttctagtttgttggcagcattcctaattgtgttctgttttttttacaag

SEQ ID NO: 3753 - DNA, 546 bp, Homo sapiens
  misc_feature 419: n = A,T,C or G
ctttgtgttctcatcggagctgcatgggaagtctgcatacagcaaagtgacctgcatgcctcaccttatggaaaggatggtgggctctggcctcctgtggctggccttggtctcctgcattctgacccaggcatctgtagtgcagcgagacccatccactgtggaggacaagtgtgagaaggcctgccgccccgaggaggagtgccttgccctcaacagcacctggggctgtttctgcagacaggacctcaatagttctgatgtccacagtttgcagcctcagctagactgtgggcccagggagaccaaggtgaaggtggacaaatgtttgctgggaggcctgggtttggggaagaggtcattgcctacctgcgagacccaaactgcagcagcatcttgcagacagaggaaaggaactngggtatctgtgaccagccccgtccaggctagtgcctgcaggaacattctggagagaaatcaaacccatgccatctacaaaaacaccctctccttggtcaatgatttcatcatcagagacaccatcct

SEQ ID NO: 3754 - DNA, 498 bp, Homo sapiens
gtgacctgcatgcctcaccttatggaaaggatggtgggctctggcctcctgtggctggccttggtctcctgcattctgacccaggcatctgcagtgcagcgagttccacgagacccatccactgtggaggacaagtgtgagaaggcctgccgccccgaggaggagtgccttgccctcaacagcacctggggctgtttctgcagacaggacctcaatagttctgatgtccacagtttgcagcctcagctagactgtgggcccagggagatcaaggtgaaggtggacaaatgtttgctgggaggcctgggtttggggaggaggtcattgcctacctgcgagacccaaactgcagcagcatcttgcagacagaggagaggaactgggtatctgtgaccagccccgtccaggctagtgcctgcaggaacattctggagagaaatcaaacccatgccatctacaaaaacaccctctccttggtcaatgatttcatcatcagag

SEQ ID NO: 3755 - DNA, 248 bp, Homo sapiens
cccgagcagtgctaatgctggctactgtgcaagcctgacttcatgctcaggattcaagaaatggaaggatgaatcttgtgagaagaagttctcctttgtttgcaagttcaaaaactagaggaagctgaaaaatggatgtctagaactggtcctgcaattactatgaagtcaaaaattaaactagactatgtctccaactcagttcagaccatctcctccctaatgagtttgcatcgctgatcttcagt

SEQ ID NO: 3756 - DNA, 144 bp, Homo sapiens
ccatgataaggacgctgctgctgtccactttggtggctggagccctcagttgtggggaccccacttacccaccttatgtgactagggtggttggcggtgaagaagcgaggcccaacagctggccctggcaggtctccctgcagt

SEQ ID NO: 3757 - DNA, 466 bp, Homo sapiens
ggcatattttgttgaatttcttcagtcggcgttcggttactcaccttccaacgtgcatgtcattggccacagcctgggtgcccacgctgctggggaggctggaaggagaaccaatgggaccattgggcgcatcacagggttggacccagcagaaccttgctttcagggcacacctgaattagtccgattggaccccagcgatgccaaatttgtggatgtaattcacacggatggtgcccccatagtccccaatttggggtttggaatgagccaagtcgtgggccacctagatttctttccaaatggaggagtggaaatgcctggatgtaaaaagaacattctctctcagattgtggacatagacggaatctgggaagggactcgagactttgcggcctgtaatcacttaagaagctacaaatattacactgatagcatcgtcaaccctgatggctttgctggattc

SEQ ID NO: 3758 - DNA, 451 bp, Homo sapiens
  misc_feature 267: n = A,T,C or G
acaccaaagaggaactggaactcaaggcaagaatgaggacaagaaaaaaagagaataagggctttgttattttcttatttagtaaaggagacaccatccacaaagatgaaagctgacttaggtagaaatgggaaagaccgaaaagttacctaagtgttttaatataacgaaactttctctctttgaggcttgcaagtagagaacagtgaagtgatataattctaactactgtagtaaatttctcagtttttgagtttctaaaggttnctgatatggcagagattgggccaaaaggtcttttcttcatgagaccaccaccataactcactgcttaaaaggagtatgaagggaaattgtgctccccttcccaccccacttaaagaaaaccacctatatacagaggcagagtaatgtggtaactagaaggcctcaactaaaaagagaagtgagt

SEQ ID NO: 3759 - DNA, 207 bp, Homo sapiens
  misc_feature 127: n = A,T,C or G
acactcaaactttatttggttgcctggatggggccagagaggaggacaagaagggtgtcaaagggtcagctcagtaggggtgattcagggtgtgctccatgatggtcagaagcgccagccacgtctncttggctgtggggatgatctgggaggctggcagcaggaagccatagcgcccagtgtcccggagctcgaaggtgaaggagt

SEQ ID NO: 3760 - DNA, 407 bp, Homo sapiens
acggatgcactttttgcccttctaaggaagacaagggaaaagagagaggaaaaaaaaaaatcagcgactctacaagaggagtggctttcttcaaccctctgtgttttagtcttctgttgtctgacttctgtttatattttgaggggaggaagtttgagtctcatttgctatgtccaaaaatagccagagcctctcttggaatgtcttgaattaactaaccctgtggaagatttcgtagtggaaaactggtggttgctattacacaagctctcattccagcaaaacagctcaatggttagatagttttggagataacgggcttatactaacaagcgtggcaagagccctaagttgggtcctatccactgtttttcctgtgaaaaatagttaataggagcagaacatgt

SEQ ID NO: 3761 - DNA, 411 bp, Homo sapiens
  misc_feature 410: n = A,T,C or G
actgaatgtcatctgcatggtcggcccccacccatttggggtagacgggcatccgagagggatgggaaaacaggtaggcgtaggtcttggcactcttggcattggctctgtgctgggctagggcaatctcggtgggcaccaggaagaggacatcggtctcaaagtccaccacagtcttcttcttattctcctgggatgagtcctgggcccaggactcggtgtagacatcaaaggtcgtcttggcgcctctgagccccttggtgattgtgaactcactgaccagcttgtagaagtcctcctccgtgactttcttgttgcccttgttgatggcaggcatgtcgatgctggcgaagatgtggccgtccatgttgttggtgcctgctatatagtcgatgtcggcggcgttggcnt

SEQ ID NO: 3762 - DNA, 384 bp, Homo sapiens
actatctggtttgagagtgcccttgaaaatttcatactgcttagagtttcctttatttccgaacaaagaaactagtatgtgtcctgtaaccttttttccagacagtgtgacagataccttatacctccaacgtgcaaaattactggcatcaccagtgtctagataaaatttctggcccacatcatttgttttcccaggatatctatcagcatagtgacccatctgtgggcagcctccacttggacaagggaaacacttgtttgcagtgaagacgttgtaagaggcacaggggaatccagcaaagccatcagggttgacgatgctatcagtgtaatatttgtagcttcttaagtgattacaggccgcaaagtctcgagtcccttc

SEQ ID NO: 3763 - DNA, 443 bp, Homo sapiens
actatctggtttgagagtgcccttgaaaatttcatactgcttagagtttcctttatttccgaacaaagaaactagtatgtgtcctgtaaccttttttccagacagtgtgacagataccttatacctccaacgtgcaaaattactggcatcaccagtgtctagataaaatttctggcccacatcatttgttttcccaggatatctatcagcatagtgacccatctgtgggcagcctccacttggacaagggaaacacttgtttgcagtgaagacgttgtaagaggcacaggggaatccagcaaagccatcagggttgacgatgctatcagtgtaatatttgtagcttcttaagtgattacaggccgcaaagtctcgagtcccttcccagattccgtctatgtccacaatctgagagagaatgttctttttacatccaggcattt

SEQ ID NO: 3764 - DNA, 644 bp, Homo sapiens
  misc_feature 613, 628: n = A,T,C or G
actgaagatcagcgatgcaaactcattagggaggagatggtctgaactgagttggagacatagtctagtttaatttttgacttcatagtaattgcaggaccagttctagacatccatttttcagcttcctctagtttttgaacttgcaaacaaaggagaacttcttctcacaagattcatccttccatttcttgaatcctgagcatgaagtcaggcttgcacagtagccagcattagcactgctcggggatccagtgtcccaggacttgtaggagaccagggacccactactccagtgccagcggcggttcttttttgggtcatggaggccaatccagacattgctgtcatcagcgctactctccttaatcagtgaggccacgaaggcaccctccgcctgggtgagcacagacaccaggttgcctgaattcatgttctggcaatagagatctgcatcaacccaggtctcagggtcttcattaaagtagtagcagtaggagcgataggcattggtgccttctgggcagctgattcggggattaggcagctctgtctgggactcctggccttggctcagagacaggaacatcagggaggagatcagcatgaagancgagttggtctgagncatgcttagcggcagt

SEQ ID NO: 3765 - DNA, 537 bp, Homo sapiens; identical to SEQ ID NO: 3724
  misc_feature 497: n = A,T,C or G

SEQ ID NO: 3766 - DNA, 402 bp, Homo sapiens
acagatgcagggggagcagagaagaaggtctatctgagtctcttggtgaagtcagggaaggattcacagtggtatgaaatttgaaacgtgggtaggagttttgcaagtcagtaaagcaagtgaacgcatcccaggctaagggaacaggagaggcaaaagcatggagatgggatagagggaatggtgcatttgtggaatttcagagttcagaggcgcaggaacctaaaatgagagcagggtgtgggagaaggagatggaagtgaaagtcagagcacagagggatgtgtctgcaagcaatggggcccactggacactcatcattgtgctggccactgatgaagacttgaggcaggccacctgctcactcagtcagctgagactgtccttggagcccatccaggt

SEQ ID NO: 3767 - DNA, 458 bp, Homo sapiens
cttccagtcccaggcttctgaagagacgtggtaagtgcggtgcagttttcaactgacctctggacgcagaacttcagccatgaaggtaacaggcatctttcttctcagtgccttggccctgttgagtctatctggtaagtgttgcatatttttcaaatttaaataaaactgttttgacctgttgctttgtgaagcacattatcttctagacttttgatgtagtctagtcttcgagagatgttttggacctaatgagatgaaataaaatcaacaggtaagaattattttttaagaggaatttttaacctactataaggaaaacaattctactagtaagaaattcccagaaataaaatggttttcctctattgatgtggctgaccctttgttgggatatggtagagaaaaaagggtaaaaatattttaactttaagtatacttctcattctgtaaatgtg

SEQ ID NO: 3768 - DNA, 100 bp, Homo sapiens
acactcaaactttatttggttgcctggatggggccagagaggaggacaagaagggtgtcaaagggtcagctcagtaggggtgattcagggtgtgctccat

SEQ ID NO: 3769 - DNA, 535 bp, Homo sapiens
gccgcccccatgcatcccttctacacccgggccgccaccatgataagcgagatcgccgccgccgtgtccttcatctccaagtttctccgcaccaaggggctcacgagcgagcgacagctgcagaccttcagccagagcctgcaggagctgctggcagaacattataaacatcactggttcccagaaaagccatgcaggggatcgggttaccgttgtattcgcatcaaccataaaatggatcctctgattggacaggcagcacagcggattggactgagcagtcaggagctgttcaggcttctcccaagtgaactcacactctgggttgacccctatgaagtgtcctacagaattggagaggatggctccatctgtgtgctgtatgaagcctcaccagcaggaggtagcactcaaaacagcaccaacgtgcaaatggtagacagccgaatcagctgtaaggaggaacttctcttgggcagaacgagcccttccaaaaactacaatatgatgactgtatcaggttaagatatagtct

SEQ ID NO: 3770 - DNA, 331 bp, Homo sapiens; identical to SEQ ID NO: 3099

SEQ ID NO: 3771 - DNA, 213 bp, Homo sapiens; identical to SEQ ID NO: 3148

SEQ ID NO: 3772 - DNA, 243 bp, Homo sapiens; identical to SEQ ID NO: 3638

SEQ ID NO: 3773 - DNA, 323 bp, Homo sapiens
  misc_feature 75: n = A,T,C or G
actatctggtttgagagtgcccttgaaaatttcatactgcttagagtttcctttatttccgaacaaagaaactantatgtgtcctgtaaccttttttccagacagtgtgacagataccttatacctccaacgtgcaaaattactggcatcaccagtgtctagataaaatttctggcccacatcatttgttttcccaggatatctatcagcatagtgacccatctgtgggcagcctccacttggacaagggaaacacttgtttgcagtgaagacgttgtaagaggcacaggggaatccagcaaagccatcagggttgacgatgc

SEQ ID NO: 3774 - DNA, 497 bp, Homo sapiens
caccttccaacgtgcatgtcattggccacagcctgggtgcccacgctgctggggaggctggaaggagaaccaatgggaccattggacgcatcacagggttggacccagcagaaccttgctttcagggcacacctgaattagtccgattggaccccagcgatgccaaatttgtggatgtaattcacacggatggtgcccccatagtccccaatttggggtttggaatgagccaagtcgtgggccacctagatttctttccaaatggaggagtagaaatgcctggatgtaaaaagaacattctctctcagattgtggacatagacggaatctgggaagggactcgagactttgcggcctgtaatcacttaagaagctacaaatattacactgatagcatcgtcaaccctgatggctttgctggattcccctgtgcctcttacaacgtcttcactgcaaacaagtgtttcccttgtccaagtggaggctgcccacagatg

SEQ ID NO: 3775 - DNA, 415 bp, Homo sapiens
ctttgtgttctcatcggagctgcatgggaagtctgcatacagcaaagtgacctgcatgcctcaccttatggaaaggatggtgggctctggcctcctgtggctggccttggtctcctgcatcctgacccaggcatctgcagtgcagcgagacccatccactgtggaggacaagtgtgagaaggcctgccgccccgaggaggagtgccttgccctcaacagcacctggggctgtttctgcagacaggacctcaatagttctgatgtccacagtttgcagcctcagctagactgtgggcccagggagatcaaggtgaaggtggacaaatgtttgctgggaggcctgggtttgggggaggaggtcattgcctacctgcgagacccaaactgcagcagcatcttgcagacagaggagagg

SEQ ID NO: 3776 - DNA, 340 bp, Homo sapiens
acaatatgctgcagcataatttgtcaggccaaccttcacaccatattttggcagttcgtgtgcatacgctgcgcagactatcatatccccctctatacgggcataagcaatctgacaaatgatatctctgtttgtcacacgaactatcatcctgtatttgggtgtgttgtatttatttttatcttgtatcaccaagcgtttccgagcataataatcagttttaccctctcgtcgtcttctaaatttcacttggtatctcttaaagtaggccttattcttaacaactttaacaaaccccatcctgcggaacagagaccggcgtccgctgctcgacagagac

SEQ ID NO: 3777 - DNA, 485 bp, Homo sapiens
  misc_feature 46: n = A,T,C or G
aaaaaaggaaaaaatacctcatcaaattacatgtaataactgaggnttaggccaagatatttttctttaggaatgaaaatgattaagccaagaatgtgaaaatcctaacaaagtagtataattagtaaggttaattagaaatgaattttggcaaaccgagatcttaggtggctcacactccatcaagtgttcctccagtatcaaaaaaaggctgtttacatgcctatacgacaatggagtggaaaagagatttttatttttctatattggcagttttcccatcagtgaccggttttattactgaacaggaacagcttaatgctgaaaatttgctgctgaatgactggcaaagactattcgactcttgaaaatttctagcacaaatgcactgaggaaaaaacgttcttcctagtaagggtctattctcaaatagagatatattccctattaaaatcagtcttaaaatagaaaatatttaaaaaagt

SEQ ID NO: 3778 - DNA, 505 bp, Homo sapiens
  misc_feature 2, 56, 421, 427, 498: n = A,T,C or G
cngaactgccacgatgctgccactttggactctttcactgctgctgggagcagtancaggaaaagaagtttgctacgaaagactcggctgcttcagtgatgactccccatggtcaggaattacggaaagacccctccatatattgccttggtctccaaaagatgtcaacacccgcttcctcctatatactaatgagaacccaaacaactttcaagaagttgccgcagattcatcaagcatcagtggctccaatttcaaaacaaatagaaaaactcgctttattattcatggattcatagacaagggagaagaaaactggctggccaatgtgtgcaagaatctgttcaaggtggaaagtgtgaactgtatctgtgtggactggaaaggtggctcccgaactggatacacacaagcctcgcanaacatnaggatcgtgggagcagaagtggcatatcttgttgaatttcttcagtcggcgttcggctactcaccttccangtgcatg

SEQ ID NO: 3779 - DNA, 199 bp, Homo sapiens; identical to SEQ ID NO: 3196

SEQ ID NO: 3780 - DNA, 230 bp, Homo sapiens
acgaacagcctctcttacaaaccactggcagaatgcaggagaaatccactctctggcatggaaaccacagtccatgaaaatggcaggcttattttgtccagctttgccaaccttcaggaggtaaatagcgcgtccctcaaatgtggttccgataacactgcgagagatgaaggctggattctcagtggcgacttgttgagtccaagcctctatcgtttcccacttgttgt

SEQ ID NO: 3781 - DNA, 360 bp, Homo sapiens
acaaccttgctgtgaaggagggccccgagcaggtgatccccatcaactctgaggagctgtttgtgcatccactctggaaccgctcgtgtgtggcctgtggcaatgacatcgccctcatcaagctctcacgcagcgcccagctgggagatgccgtccagctcgcctcactccctcccgctgatgacatccttcccaacaagacaccctgctacatcaccggctggggccgtctctataccaatgggccactcccagacaagctgcagcaggcccggctgcccgtggtggactataagcactgctccaggtggaactggtggggttccaccgtgaagaaaaccatggtgtgtgctggagggt

SEQ ID NO: 3782 - DNA, 215 bp, Homo sapiens
actgacggtgaacccagaggctgcacaggagagtctcagggaccccccaggctggatcaagcctcctccagactccaccagctgcacctcacactggacatcttttaaaatggcaacaaggagaacccagctcagccagaactccatgatgagtcttctgtcttcagtgctgatcactgaatggaaacacctgggaatcccgggcctggggctcc

SEQ ID NO: 3783 - DNA, 564 bp, Homo sapiens
actatctggtttgagagtgcccttgaaaatttcatactgcttagagtttcctttatttccgaacaaagaaactagtatgtgtcctgtaacctttttccagacagtgtgacagataccttatacctccaacgtgcaaaattactggcatcaccagtgtctagataaaatttctggcccacatcatttgttttcccaggatatctatcagcatagtgacccatctgtgggcagcctccacttggacaagggaaacacttgtttgcagtgaagacgttgtaagaggcacaggggaatccagcaaagccatcagggttgacgatgctatcagtgtaatatttgtagcttcttaagtgattacaggccgcaaagtctcgagtcccttcccagattccgtctatgtccacaatctgagagagaatgttctttttacatccaggcatttccactcctccatttggaaagaaatctaggtggcccacgacttggctcattccaaaccccaaattggggactatgggggcaccatccgtgtgaattacatccacaaatttggcatcgctgggg

SEQ ID NO: 3784 - DNA, 207 bp, Homo sapiens
acactcaaactttatttggttgcctggatggggccagagaggaggacaagaagggtgtcaaagggtcagctcagtagggatgattcagggtgtgctccatgatggtcagaagcgccagccacgtctccttggctgtggggatgatctgggaggctggcagcaggaagccatagcgcccagtgtcccggagctcgaaggtgaaggagt

SEQ ID NO: 3785 - DNA, 196 bp, Homo sapiens
accggttggaaggcactccctggtgtaatctgagatactgcacagacccatccactgtggaggacaagtgtgagaaggcctgccgccccgaggaggagtgccttgccctcaacagcacctggggctgtttctgcagacaggacctcaatagttctgatgtccacagtttgcagcctcagctagactgtgggcccag

SEQ ID NO: 3786 - DNA, 270 bp, Homo sapiens
acgggttgtccagcagaaatttacagctgtccagcttcttggcctggtcatagcagttgtcatgtgtctggcagcacttgtccagttcatccacggggggtgcctgagccccccaagccacagtagcagccgtagttgttgtattccaagaaggggtcactccccgggatcacgcacttgatcattttgcggaactgccacacggcccgagggctgatgccgctgtcggcggcggccactgtgagcagcacagctagcacaaggagtttc

SEQ ID NO: 3787 - DNA, 411 bp, Homo sapiens; identical to SEQ ID NO: 3218

SEQ ID NO: 3788 - DNA, 331 bp, Homo sapiens; identical to SEQ ID NO: 3037

SEQ ID NO: 3789 - DNA, 577 bp, Homo sapiens
acacctctactcattcactgcagggatggatctcagcaaacgggaatattttgtgctttgttaaatctcttagaaagtgcggaaacagaagaggtagtggatatttttcaagtggtaaaagctctacgcaaagctaggccaggcatggtttccacattcgagcaatatcaattcctatatgacgtcattgccagcacctaccctgctcagaatggacaagtaaagaaaaacaaccatcaagaagataaaattgaatttgataatgaagtggacaaagtaaagcaggatgctaattgtgttaatccacttggtgccccagaaaagctccctgaagcaaaggaacaggctgaaggttctgaacccacgagtggcactgaggggccagaacattctgtcaatggtcctgcaagtccagctttaaatcaaggttcattggaaaagacataaatgaggaaactccaaacctcctgttagctgttatttctatttttgtagaagtaggaagtgaaaataggtatacagtggattaattaaatgcagcgaaccaatatttgtagaagggttatattttactact

SEQ ID NO: 3790 - DNA, 298 bp, Homo sapiens
  misc_feature 241, 275, 276, 292: n = A,T,C or G
actcattccaatgaatttgactcagatgtggatgttggggacttgcagatggttaaatttatttggtataacaatgtgatcaacccaactttacctagagtgggagcatccaagattatagtggagacaaatgttggaaaacagttcaacttctgtagtccagaaaccgtcagggaggaagttctgctcaccctcacaccgtgttaggagactactgttatttgaccaatgaattgacttntaataaaatctagtggtgatgcataaaaaaaaannaaaaaaaaaaaaaaangcttgt

SEQ ID NO: 3791 - DNA, 511 bp, Homo sapiens
  misc_feature 395, 403, 463, 489: n = A,T,C or G
aagaaaactggctggccaatgtgtgcaagaatctgttcaaggtggaaagtgtgaactgtatctgtgtggactggaaaggtggctcccgaactggatacacacaagcctcgcagaacatcaggatcgtgggagcagaagtggcatattttgttgaatttcttcagtcggcgttcggttactcaccttccaacgtgcatgtcattggccacagcctgggtgcccacgctgctggggaggctggaaggagaaccaatgggaccattggacgcatcacagggttggacccagcagaaccttgctttcagggcacacctgaattagtccgattggaccccagcgatgccaaatttgtggatgtaattcacacggatggtgcccccatagtccccaatttnggggtttnggaatgagccaagtcgtgggccacctagatttctttccaaatggaggagtggaaatgccntggatgtaaaaagaacattctctctnagattgtggacatagacagaat

SEQ ID NO: 3792 - DNA, 540 bp, Homo sapiens
agatcactcaagactacgggcaggatgcagctttcaccgccattctcgacaccttggacatcttcctggagatcgtcaccaaccctgatggctttgccttcacgcacagcacgaatcgcatgtggcgcaagactcggtcccacacagcaggctccctctgtattggcgtggaccccaacaggaactgggacgctggctttgggttgtccggagccagcagtaacccctgctcggagacttaccacggcaagtttgccaattccgaagtggaggtcaagtccattgtagactttgtgaaggaccatgggaacatcaaggccttcatctccatccacagctactcccagctcctcatgtatccctatggctacaaaacagaaccagtccctgaccaggatgagctggatcagctttccaaggctgctgtgacagccctggcctctctctacgggaccaagttcaactatggcagcatcatcaaggcaatttatcaagccagtggaagcactattgactggacctacagccagggcatcaagt

SEQ ID NO: 3793 - DNA, 207 bp, Homo sapiens; identical to SEQ ID NO: 2996

SEQ ID NO: 3794 - DNA, 331 bp, Homo sapiens
accagcagaaacctggccaggctcccaggctcctcgtttatggtgcttctagcagggccactggcatcccagacaggttcagtggcggtgggtctgggacagacttcactctcaccatcagcaccctggagcctgaagatttcgctgtctattactgtcaccagtatgctgactcaccgctcactttcggcggggggaccaaggtggagatcaaacgaactgtggctgcaccatctgtcttcatcttcccgccatctgatgagcagttgaaatctggaactgcctctgttgtgtgcctgctgaataacttctatcccagagaggccaaagt

SEQ ID NO: 3795 - DNA, 462 bp, Homo sapiens
acattagcaccataacatgcgtctttaaagccttcccaaatattagtaatcttgaccagcaatgacaagaaaaaagaggagcacctttacaagcagttgatatccaatattaaaataattgtggctttaaaaatatttctttaaattcttgcattacacttttctttttaaaccaatcttccaggagattaatcaatgaaatttataagttttatcaacgtataaaatttttttcatcttctgggactcatagaatacaatctgtgtttctgaccagttgaggtagttaaaatagggagggcttttctaatttcgtatttgactatttcagaaagaaaggttatcttttactggtgagcacagtcattgctctgcagatgggctaggattcaaagaatataacacagtgttgttatcataaagagtgttgaagtttatttattatagcaccattgagacatt

SEQ ID NO: 3796 - DNA, 207 bp, Homo sapiens; identical to SEQ ID NO: 2996

SEQ ID NO: 3797 - DNA, 370 bp, Homo sapiens
accctgatgtagcccacctggggcctgtgctgtaggaaccagcggtaggacaccttgtccttccagcccacattcctggagtccttccacagcagcctgacctggtcactggtgtcccccgtgtgccacagggagttccggagatgctcccctggacctgtctcagacttcacagccttgagctgaatgccaggttctgcaactgctcggaatggggtggcttgccaatatgtctgctccgtctgcttccacatgaccacgtagaagctggagctatcttggtagccaaagataaagcctgcatagtcatcatctgtctgggtattcacatggaaggtcccttcgaagtcaactccattaaaagctgtgt

SEQ ID NO: 3798 - DNA, 181 bp, Homo sapiens
cgcgttgtccatggtgaggatgcggtcccctacagctggccctggcaggtttccctgcagtatgagaaaagtggaagcttctaccacacgtgtggcggtagcctcatcgcccccgattgggttgtgactgccggccactgcatctcgagggatctgacctaccaggtggtgttgggtgagt

SEQ ID NO: 3799 - DNA, 207 bp, Homo sapiens; identical to SEQ ID NO: 2996

SEQ ID NO: 3800 - DNA, 565 bp, Homo sapiens
  misc_feature 524, 525, 529, 562: n = A,T,C or G
actatctggtttgagagtgcccttgaaaatttcatactgcttagagtttcctttatttccgaacaaagaaactagtatgtgtcctgtaaccttttttccagacagtgtgacagataccttatacctccaacgtgcaaaattactggcatcaccagtgtctagataaaatttctggcccacatcatttgttttcccaggatatctatcagcatagtgacccatctgtgggcagcctccacttggacaagggaaacacttgtttgcagtgaagacgttgtaagaggcacaggggaatccagcaaagccatcagggttgacgatgctatcagtgtaatatttgtagcttcttaagtgattacaggccgcaaagtctcgagtcccttcccagattccgtctatgtccacaatctgagagagaatgttctttttgcatccaggcatttccactcctccatttggaaagaaatctaggtggcccacgacttggctcattccaaaccccaaattggggactatgggggcannatangtgtgaattacatccacaaatttggcatcgctnggg

SEQ ID NO: 3801 - DNA, 480 bp, Homo sapiens
cttcctgatatcatcaaagatcagaaggcctacaaggaaggcaagctacagaaggctttagaagatgccttcttggctattgacaccaaattgaccactgaagaagtcattaaagagctggcacagattgcagggcgacccactgaggatgaagatgaaaaagaaaaagtagctgatgaagatgatgggacctggggagtccttatgttaaagaaacctatgatgttctcctgcattgtatgtggttatgaaaaggagggagagaattatcttcgttgagtggcatctgagcttggacaatgaggaggctgcactgctgcatgaagaggctaccatgactattgaagagctgctgacacgctacgggcagaactgtcacaagggccctccccacagcaaatctggaggtgggacaggcgaggaaccagggtcccagggcctcaatggggaggcaggacctgaggactcaactagggaaac

SEQ ID NO: 3802 - DNA, 480 bp, Homo sapiens
gttgccgcagattcatcaagcatcagtggctccaatttcaaaacaaatagaaaaactcgctttattattcatggattcatagacaagggagaagaaacctggctggccaatgtgtgcaagaatctgttcaaggtggaaagtgtgaactgtatctgtgtggactggaaaggtggctcccgaactggatacacacaagcctcgcagaacatcaggatcgtgggagcagaagtggcatattttgttgaatttcttcagtcggcgttcggttactcaccttccaacgtgcatgtcattggccacagcctgggtgcccacgctgctggggaggctggaaggagaaccaatgggaccattggacgcatcacagggttggacccagcagaaccttgctttcagggcacacctgaattagtccgattggaccccagcgatgccaaatttgtggatgtaattcacacggatggtgcccccatagtcccc

SEQ ID NO: 3803 - DNA, 446 bp, Homo sapiens
actatctggtttgagagtgcccttgaaaatttcatactgcttagagtttcctttatttccgaacaaagaaactagtatgtgtcctgtaaccttttttccagacagtgtgacagataccttatacctccaacgtgcaaaattactggcatcaccagtgtctagataaaatttctggcccacatcatttgttttcccaggatatctatcagcatagtgacccatctgtgggcagcctccacttggacaagggaaacacttgtttgcagtgaagacgttgtaagaggcacaggggaatccagcaaagccatcagggttgacgatgctatcagtgtaatatttgtagcttcttaagtgattacgggccgcaaagtctcgagtcccttcccagattccgtctatgtccacaatctgagagagaatgttctttttacatccaggcatttcca

SEQ ID NO: 3804 - DNA, 470 bp, Homo sapiens
  misc_feature 404, 409: n = A,T,C or G
acattatttttaaggcattcaaagcatgtaagtaacaatttggatcgtattatatgcttattcaggacccattttcatttttctacttaacctagtgatatgatccaagtaattcttgtgcaagaatgtcttccctaataccctccccaagcattcactctgagcctctatttatcttgtcttgtaagagtttgtaacagaaaagcaggagacaaggaagtctttatggttgtgcaaagaagttgtttacctgtttgcaggcaaacaaaccaaaacacacgcatgcaaaaacgcaaagaaaacaaagcaaaaaaaaaaaaaaaaaaaaacacttggcaatgtggcagtttataaagccagattaagttacaatagggttgtgtgagttagggcaggagcattanaaacntgcacataggaatggctagtcaatgcaacattcagtgccagcatgaaaatgcttaggaatt

SEQ ID NO: 3805 - DNA, 432 bp, Homo sapiens
tgtaaaaagaacattctctctcagattgtggacatagacggaatctgggaagggactcgagactttgcggcctgtaatcacttaagaagctacaaatattacactgatagcatcgtcaaccctgatggctttgctggattcccctgtgcctcttacaacgtcttcactgcaaacaagtgtttcccttgtccaagtggaggctgcccacagatgggtcactatgctgatagatatcctgggaaaacaaatgatgtgggccagaaactttatctagacactggtgatgccagtaattttgcacgttggaggtataaggtatctgtcacactgtctggaaaaaaggttacaggacacatactagtttctttgttcggaaataaaggaaactctaagcagtatgaaattttcaagggcactctcaaaccagatagt

SEQ ID NO: 3806 - DNA, 299 bp, Homo sapiens
  misc_feature 6, 45, 128, 141, 149, 228, 256, 294: n = A,T,C or G
ctggantcccctgtgcctcttacaacgtcttcactgcaaacaagngtttcccttgtccaagtggaggctgcccacagatgggtcactatgctgatagatatcctgggaaaacaaatgatgtgggccanaaattttatctanacactggngatgccagtaattttgcacgttggaggtataaggtatctgtcacactgtctggaaaaaaggttacaggacacatactantttctttgttcggaaataaaggaaactntaagcagtatgaaattttcaagggcactctcaaaccanatagt

SEQ ID NO: 3807 - DNA, 350 bp, Homo sapiens
  misc_feature 39, 64, 75, 89, 121, 148, 153, 229, 325: n = A,T,C or G
acaagcttttttttttttttttttttttttttttatggnttgcaggaggcctttaattgtgaanagcgcaatcanaaaacagatatgcntggtcaaggaggtggccagcccgggagatgcnctggagcaggggagagatgcccctgcncctantggcctacagcattctgggctaggtgtgggagtgggtgggcagtctcactgcttggagcgtccagcgtcatggcanatgccaaagttggtgttggtgatggagcccacgatggtcttgtctccctcacaggtcaggccacgctcacagggacacttgtagtaaatcccatanagcgtcttgacagacactcgctgtt

SEQ ID NO: 3808 - DNA, 76 bp, Homo sapiens
ggctgttcagggacagaatgtgctacacggataccccaaggacatctacagctcctttggcttccctagaactgtg

SEQ ID NO: 3809 - DNA, 462 bp, Homo sapiens
acagctgggatttgaacttggcattctagctccagcatccatggccttaaccaccatgctgtcctttctcattttgattgaataggctaatacattccttgtccttagaatagagtcttgcctgtagtaagtgttcaggtggcagctttagggctctcacttatcccattggactgggagtcaggcttgatgcttccactaagtatcacacaaccttggcaagattcttgtgccccggtgaaatgaaagggttggacttgggggcctcaagtccagcccgcactgcatcctgatcttctctctccatgccccatcacctagacccatccactgtggaggacaagtgtgagaaggcctgccgccccgaggaggagtgccttgccctcaacagcacctggggctgtttctgcagacaggacctcaatagttctgatgtccacagtttgcagcctcagctagact

SEQ ID NO: 3810 - DNA, 230 bp, Homo sapiens; identical to SEQ ID NO: 3096

SEQ ID NO: 3811 - DNA, 456 bp, Homo sapiens
acttgatgccctggctgtaggtccagtcaatagtgcttccactggcttgataaattgccttgatgatgctgccatagttgaacttggtcccgtagagagaggccagggctgtcacagcagccttggaaagctgatccagctcatcctggtcagggactggttctgttttgtagccatagggatacatgaggagctgggagtagctgtggatggagatgaaggccttgatgttcccatggtccttcacaaagtctacaatggacttgacctccacttcggaattggcaaacttgccgtggtaagtctccgagcaggggttactgctggctccggacaacccaaagccagcgtcccagttcctgttggggtccacgccaatacagagggagcctgctgtgtgggaccgagtcttgcgccacatgcgattcgtgctgtgcgtgaaggcaaagccatcag

SEQ ID NO: 3812 - DNA, 258 bp, Homo sapiens
actcacccaacaccacctggtaggtcagatccctcgagatgcagtggccggcagtcacaacccaatcgggggcgatgaggctaccgccacacgtgtggtagaagcttccacttttctcatactgcagggaaacctgccagggccagctgtaggggaccgcatcctcaccatggacaacgcggctggaagagtgagaggaaggtgggccatagcctgaggcaacggccacaaggaggagggaactgggcagccggagca

SEQ ID NO: 3813 - DNA, 492 bp, Homo sapiens
  misc_feature 490: n = A,T,C or G
tgctcagctcctggggctgctaatgctctggatccctggatccagtgcggatattgtgatgacccagactccactctctctgtccgtcacccctggacagccggcctccatctcctgcaagtctagtcagagcctcctgcatagtgatggaaagacctatttgtattggtgcctgcagaagccaggccagtctccacagctcctattctatgaagtttccagccggttctctggagtgccagataggttcagtggcagcgggtcagggacagatttcacactgaaaatcagccgggtggaggctgaggatgtttggggtttattactgcatgcagagtatacaccttcctcggacttttggccaggggaccaagctggagatcaaacgaactgtggctgcaccatctgtcttcatcttcccgccatctgatgagcagttgaaatctggaactgcctctgttgtgtgcctgctgaataacttctatcccanag

SEQ ID NO: 3814 - DNA, 151 bp, Homo sapiens
  misc_feature 39, 41, 63, 90, 99, 106, 134: n = A,T,C or G
acaagcttttttttttttttttttttttttttttttagngntccatgggtttacctgaggctntgtggggagcagggtcggagggagccncgggctcanttggcanccaggatcttctgcacccaagggatgancttggtgacacgggcgt

SEQ ID NO: 3815 - DNA, 313 bp, Homo sapiens
actcattccaatgaatttgactcagatgtggatgttggggacttgcagatggttaaatttatttggtataacaatgtgatcaacccaactttacctagagtgggagcatccaagattatagtggagacaaatgttggaaaacagttcaacttctgtagtccagaaaccgtcagggaggaagttctgctcaccctcacaccgtgttaggagactactgttatttgaccaatgaattgacttctaataaaatctagtggtgatgcaaaaaaaaaaaaaaaaaaaaaaaaagcttgtaaaaaaaaaaaaagcttgt

SEQ ID NO: 3816 - DNA, 290 bp, Homo sapiens
  misc_feature 247: n = A,T,C or G
acctatggacgtgagatccaagtgacagagcttctcaacaagttagacttttatgtcctgcctgtgctcaatattgatggctacatctacacctggaccaagagccgattttggagaaagactcgctccacccatactggatctagctgcattggcacagaccccaacagaaattttgatgctggttggtgtgaaattggagcctctcgaaacccctgtgatgaaacttactgtggacctgccgcanagtctgaaaaggagaccaaggccctggctgatttcatccgcac

SEQ ID NO: 3817 - DNA, 280 bp, Homo sapiens
  misc_feature 54, 89, 101, 209, 215, 254: n = A,T,C or G
acagagtcttttgcttcctcccacccctagggggaaaaactgctttgtgctttnggaagttgtctctgaaacccggggacagaggacgnaggacagactangagggagccgggaggatgggctgcagctgtggaggagggtttcagaggagagaggtcggagagcagaggcctgagaagccagaggcaggtggagagagggtggaaagngagcancgggctgggctggagccgcacacgctctcctcccatgtnaaatagcacctttagaaaaattcaca

SEQ ID NO: 3818 - DNA, 331 bp, Homo sapiens; identical to SEQ ID NO: 3009

SEQ ID NO: 3819 - DNA, 431 bp, Homo sapiens
taaaaattgaaaaataaaagccacaagtggtgcaaatgtttaaactacctcaaaacactttcccatgagtgtgatccacattgttaggtgctgacctagacagagatgaactgaggtccttgttttgttttgttcataatacaaaggtgctaattaatagtatttcagatacttgaagaatgttgatggtgctagaagaatttgagaagaaatactcctgtattgagttgtatcgtgtggtgtattttttaaaaaatttgatttagcattcatattttccatcttattcccaattaaaagtatgcagattatttgcccaaagttgtcctcttcttcagattcagcatttgttctttgccagtctcattttcatcttcttccatggttccacagaagctttgtttcttgggcaagtagaaaaattaaattgt

SEQ ID NO: 3820 - DNA, 273 bp, Homo sapiens
gtcttcactgcaaacaagtgtttcccttgtccaagtggaggctgcccacagatgggtcactatgctgatagatatcctgggaaaacaaatgatgtgggccagaaattttatctagacactggtgatgccagtaattttgcacgttggaggtataaggtatctgtcacactgtctggaaaaaaggttacaggacacatactagtttctttgttcggaaataaaggaaactctaagcagtatgaaattttcaagggcactctcaaaccagatagt

SEQ ID NO: 3821 - DNA, 284 bp, Homo sapiens
acagataagaatctgtcaaatgataactgaattcacgtgactaaccactcttttacgtaagattgtatctactcatgagaaataggggaattcagtgttatcattatagtctccgtatttaaactgagtttttcttttccaattttttttccatgcctcaacataagggaaattaatcagttaatttctgctgacttaggtttcctaaacagcttttagttctcaaggcacagctgtggtaaaaacagagcaaaacacccagccatttattggaattctgcagt

SEQ ID NO: 3822 - DNA, 185 bp, Homo sapiens
gtgcagcatgatgctgcccccttggaccctcggccttctcctgctggccacagtcagcggaaaagaggtctgctacggacaacttggctgcttttctgatgaaaaaccatgggcaggaacccttcagcgacctgtaaaattacctccctggtcccccgaggacattgacacccgctttcttctgt

SEQ ID NO: 3823 - DNA, 415 bp, Homo sapiens
  misc_feature 402: n = A,T,C or G
tacaaaaacaccctctccttggtcaatgatttcatcatcagagacaccatcctcaacatcaactttcaatgtgcctacccactggacatgaaagtcagcctccaagctgccttgcagcccattgtaagttccctgaacgtcagtgtggacgggaatggagagttcattgtcaggatggccctcttccaagaccagaactacacgaatccttacgaaggggatgcagttgaactgtctgttgagtccgtgctgtatgtgggtgccatcttggaacaaggggacacctcccggtttaacctggtgttgaggaactgctatgccacccccactgaagacaaggctgaccttgtgaagtatttcatcatcagaaacagctgctcaaatcagcgtgattccaccatnccacgtggaggag

SEQ ID NO: 3824 - DNA, 166 bp, Homo sapiens
actgcttggggactattggagaaaataaggtggagtcctacttgtttaaaaaatatgtatctaagaatgttctagggcactctgggaacctataaaggcaggtatttcgggccctcctcttcaggaatcttcctgaagacatggcccagtcgaaggcccaggatgg

SEQ ID NO: 3825 - DNA, 299 bp, Homo sapiens
  misc_feature 282: n = A,T,C or G
actcattccaatgaatttgactcagatgtggatgttggggacttgcagatggttaaatttatttggtataacaatgtgatcaacccaactttacctagagtgggagcatccaagattatagtggagacaaatgttggaaaacagttcaacttctgtagtccagaaaccgtcagggaggaagttctgctcaccctcacaccgtgttaggagactactgttatttgaccaatgaattgacttctaataaaatctagtggtgatgcaaaaaaaaaaaaaaaaaanaaaaaaaaagcttgtac

SEQ ID NO: 3826 - DNA, 247 bp, Homo sapiens
actcacccaacaccacctggtaggtccaggagctcgagatgcagtggccggcagtcacaacccagtcgggggcgatgaagctaccgccacacgtgtggtagaagcttccacttttctcatactgcagggaaacctgccagggccagctgtaggggaccgcatcctcaccattgacaacgcggctggaagggcgagaggaaggtgggccatagcctgaggcaacggccacaaggaggagggaactgag

SEQ ID NO: 3827 - DNA, 327 bp, Homo sapiens
  misc_feature 277, 287, 289, 301: n = A,T,C or G
actcattccaatgaatttgactcagatgtggatgttggggacttgcagatggttaaatttatttggtataacaatgtgatcaacccaactttacctagagtgggagcatccaagattatagtggagacaaatgttggaaaacagttcaacttctgtagtccagaaaccgtcagggaggaagttctgctcaccctcacaccgtgttaggagactactgttatttgaccaatgaattgacttctaataaaatctagtggtgatgcaaaaaaaaaaaaanaaaaaaaaananaaaggaaaaaanaaaaaaaaaaaaaaaaaaaggcttgt

SEQ ID NO: 3828 - DNA, 491 bp, Homo sapiens
  misc_feature 400: n = A,T,C or G
acatttacaaagatgcgttcaaatagtgctctaagagttttgttcagtggctcacttcggctaaaatgcagaaatgcatgctgtcagcgttggtatttcacattcaatggagctgaatgttcaggacctcttcccattgaagctataatttatttggaccaaggaaaccctgaaatgaattcaacaattaatattcatcgcacttcttctgtggaaggactttgtgaaggaattggtgctggattagtggatgttgctatctgggttggcacttgttcagattacccaaaaggagatgcttctactggatggaattcagtttctcgcatcattattgaagaactaccaaaataaatgctttaattttcatttgctacctctttttttattatgccttggnatggttcacttaaatgacattttaaataagtttatgtatacatctgaatgaaaagcaaagctaaatatgtttacagaccaaagtgtgattt

SEQ ID NO: 3829 - DNA, 492 bp, Homo sapiens
atgctatcaaagtatactgtgatttctctactggcgaaacctgtatccgggcccaacctgaaaacatcccagccaagaactggtataggagctccaaggacaagaaacacgtctggctaggagaaactatcaatgctggcagccagtttgaatataatgtagaaggagtgacttccaaggaaatggctacccaacttgccttcatgcgcctgctggccaactatgcctctcagaacatcacctaccactgcaagaacagcattgcatacatggatgaggagactggcaacctgaaaaaggctgtcattctacagggctctaatgatgttgaacttgttgctgagggcaacagcaggttcacttacactgttcttgtagatggctgctctaaaaagacaaatgaatggggaaagacaatcattgaatacaaaacaaataagccatcacgcctgcccttccttgatattgcacctttggacatcggtggtgctg

SEQ ID NO: 3830 - DNA, 213 bp, Homo sapiens; identical to SEQ ID NO: 3148

SEQ ID NO: 3831 - DNA, 330 bp, Homo sapiens
acctatggacgtgagatccaagtgacagagcttctcaacaagttagacttttatgtcctgcctgtgctcaatattgatggctacatctacacctggaccaagagccgattttggagaaagactcgctccacccatactggatctagctgcattggcacagaccccaacagaaattttgatgctggttggtgtgaaattggagcctctcgaaacccctgtgatgaaacttactgtggacctgccgcagagtctgaaaaggagaccaaggccctggctgatttcatccgcacaaactctcttccatcaaggcatatctgacaatccactcgt

SEQ ID NO: 3832 - DNA, 207 bp, Homo sapiens; identical to SEQ ID NO: 2996

SEQ ID NO: 3833 - DNA, 517 bp, Homo sapiens
  misc_feature 464: n = A,T,C or G
actatctggtttgagagtgcccttgaaaatttcatactgcttagagtttcctttatttccgaacaaagaaactagtatgtgtcctgtaaccttttttccagacagtgtgacagataccttatacctccaacgtgcaaaattactggcatcaccagtgtctagataaaatttctggcccacatcatttgttttcccaggatatctatcagcatagtgacccatctgtgggcagcctccacttggacaagggaaacacttgtttgcagtgaagacgttgtaagaggcacaggggaatccagcaaagccatcagggttgacgatgctatcagtgtaatatttgtagcttcttaagtgattacaggccgcaaagtctcgagtcccttcccagattccgtctatgtccacaatctgagagagaatgttctttttacatccaggcatttccactcctccatttggaaagnaatctaggtggcccacgacttggctcattccaaaccccaaattggggactatg

SEQ ID NO: 3834 - DNA, 258 bp, Homo sapiens
  misc_feature 193, 194: n = A,T,C or G
aggtgactaactgcaacggagagactcaagatgattccctttttacccatgttttctctactattgctgcttattgttaaccctataaacgccaacaatcattatgacaagatcttggctcatagtcgtatcaggggtcgggaccaaggcccaaatgtctgtgcccttcaacagattttgggcaccaaaaagnnatacttcagcacttgtaagaactggtataaaaagtccatctgtggacagaaaacgactgtgtta

SEQ ID NO: 3835 - DNA, 370 bp, Homo sapiens
  misc_feature 58, 325, 332, 333, 335, 339, 342, 358, 360: n = A,T,C or G
accaagcaatgaagaacaaattaaaaatctgctacaattggaggctcaagaacatctncagcttgatttttggaaatcacccaccaccccaggtgagacagcccacgtccgagttcccttcgtcaacgtccaggcagtcaaagtgttcttggagtcccagggaattgcctattccatcatgattgaagacgtgcaggtcctgttggacaaagagaatgaagaaatgctttttaataggagaagagaacggagtggtaacttcaattttggggcctaccataccctggaagagatttcccaagaaatggataacctcgtggctgancaccctnntntagngancaaagagaatattggntnttcttttgag

SEQ ID NO: 3836 - DNA, 318 bp, Homo sapiens
  misc_feature 282, 313: n = A,T,C or G
gtcaaccctgatggctttgctggattcccctgtgcctcttacaacgtcttcactgcaaacaagtgtttcccttgtccaagtggaggctgcccacagatgggtcactatgctgatagatatcctgggaaaacaaatgatgtgggccagaaattttatctagacactggtgatgccagtaattttgcacgttggaggtataaggtatctgtcacactgtctggaaaaaaggttacaggacacatactagtttctttgttcggaaataaaggaaactctaagcantatgaaattttcaagggcactctcaaaccanatagt

SEQ ID NO: 3837 - DNA, 366 bp, Homo sapiens
gcggcctgtaatcacttaagaagctacaaatattacactgatagcatcgtcaaccctgatggctttgctggattcccctgtgcctcttacaacgtcttcactgcaaacaagtgtttcccttgtccaagtggaggctgcccacagatgggtcactatgctgatagatatcctgggaaaacaaatgatgtgggccagaaattttatctagacactggtgatgccagtaattttgcacgttggaggtataaggtatctgtcacactgtctggaaaaaaggttacaggacacatactagtttctttgttcggaaataaaggaaactctaagcagtatgaaattttcaagggcactctcaaaccagatagt

SEQ ID NO: 3838 - DNA, 250 bp, Homo sapiens
tccgacgtggtcgtggctggggagtttgaccagggctctgacgaggagaacatccaggtcctgaagatcgccaaggtcttcaagaaccccaagttcagcattctgaccgtgaacaatgacatcaccctgctgaagctggccacacctgcccgcttctcccagacagtgtccgccgtgtgcctgcccagcgccgacgacgacttccccgcggggacactgtgtgccaccacaggctggggcaagaccaagt

SEQ ID NO: 3839 - DNA, 401 bp, Homo sapiens
  misc_feature 380: n = A,T,C or G
actccgtgtggatcggcggctccatcctggcctcgctgtccaccttccagcagatgtggatcagcaagcaggagtatgacgagtccggcccctccatcgtccaccgcaaatgcttctaggcggactatgacttagttgcgttacaccctttcttgacaaaacctaacttgcgcagaaaacaagatgagattggcatggctttatttgtttttttgttttgttttggttttttttttttttttggcttgactcaggatttaaaaactggaacggtgaaggtgacagcagtcggttggagcgagcatcccccaaagttcacaatgtggccgaggactttgattgcacattgttgtttttttaatagtcattccaaatatganatgcgttgttacaggaagtcc

SEQ ID NO: 3840 - DNA, 458 bp, Homo sapiens
accagaaccgagttcgggatactcacaggctcatcactcagatgcagctgagcctggcagaaagtgaagcttccttgggaaacactaacattcctgcctcagaccactacgtggggccaagtggctttaaaagtctggctcaggaggccacaagattagcagaaagccacgttgagtcagccagtaacatggagcaactgacaagggaaactgaggactattccaaacaagccctctcactggtgcgcaaggccctgcatgaaggagtcggaagcggaagcggtagcccggacggtgctgtggtgcaagggcttgtggaaaaattggagaaaaccaagtccctggcccagcagttgacaagggaggccactcaagcggaaattgaagcagataggtcttatcggcacagtctccgcctcctggattcagtgtctcggcttcagggagtcagtgatcag

SEQ ID NO: 3841 - DNA, 522 bp, Homo sapiens
  misc_feature 390: n = A,T,C or G
ggaaaggtggctcccgaactggatacacacaaacctcgcagaacatcaggatcgtgggagcagaagtggcatattttgttgaatttcttcagtcggcgttcggttactcaccttccaacgtgcatgtcattggccacagcctgggtgcccacgctgctggggaggctggaaggagaaccaatgggaccattggacgcatcacagggttggacccagcagaaccttgctttcagggcacacctgaattagtccgattggaccccagcgatgccaaatttgtggatgtaattcacacggatggtgcccccatagtccccaatttggggtttggaatgagccaagtcgtgggccacctagatttctttccaaatggaggagtggaaatgcctngatgtaaaaagaacattctctctcagattgtggacatagacggaatctgggaagggactcgagactttgcggcctgtaattcacttaagaagctacaaatattacactgatagcatcgtcaaccctgatggc

SEQ ID NO: 3842 - DNA, 521 bp, Homo sapiens
  misc_feature 444: n = A,T,C or G
actatctggtttgagagtgcccttgaaaatttcatactgcttagagtttcctttatttccgaacaaagaaactagtatgtgtcctgtaaccttttttccagacagtgtgacagataccttatacctccaacgtgcaaaattactggcatcaccagtgtctagataaaatttctggcccacatcatttgttttcccaggatatctatcagcatagtgacccatctgtgggcagcctccacttggacaagggaaacacttgtttgcagtgaagacgttgtaagaggcacaggggaatccagcaaagccatcagggttgacgatgctatcagtgtaatatttgtagcttcttaagtgattacaggccgcaaagtctcgagtcccttcccagattccgtctatgtccacaatctgagagagaatgttctttttacatccaggcatttncactcctccatttggaaagaaatctaggtggcccacgacttggctcattccaaccccaaattgggaactatgggggc

SEQ ID NO: 3843 - DNA, 172 bp, Homo sapiens
actccgggaagactagatgacttggtgtcaactggaaagctgaacttatctcaagttagattcctggtcctggatgaagctgatgggcttctttctcaaggttattctgattttataaataggatgcacaatcagattcctcaggttacctctgatggaaaaagacttcagg

SEQ ID NO: 3844 - DNA, 475 bp, Homo sapiens
ggtagagtggctcacacctgtaatcccagcactttgggaggccaagccgggcagattacctgaggtcaggagttcgagaccagcttggccaacatggcgaaaccccgtctctactaaaaatacaaaaattagccaggcttgggggcgcacgcctgtagtcccagctcctcaggagctgaggtaggagaatcacttgaacccaggaggcaaagggtgcagggagttgagccaagatcgcgccattgcaccctagcctgggcaacagagcgagattctgtttcaaaaaacccccaagtgtattataaggcaataattcctatacgaagcaaactaaaatgcagcaatattaaggtataaaaacaaagaggaataattccattgaaccttgattctggaaactttgatccacccagcagtcatgatgttagactcattgaaaagaatgtatttctaatgcatgatgcgatcggtctat

SEQ ID NO: 3845 - DNA, 434 bp, Homo sapiens
acaacagcagttgacaatagtagctcagaacagcaaaaaggattagccccgccccccaagtcatagtcctgatgtagactggactgattaaggaaccttgactgaaagagtagttactaactcaatgtgtagtaacttcccttaaaagagaaaagtttttttgttcctcaaaataaacaaaaatgttagtttggtgtgttcttcattaaaccatagacaatgacaaaagacaagagtaaggcaggcttaaaaagggaacaatataaacttcgtaataattttcatagcataatagaggactaaaatgcaaagctatttaacaaactcatgaggaaacaagtaaagcaactattttttaactaaaaaattcaaaatctgctatagctgattctgacaggtaggtgagagaaagacatgaaataaaatgaaaatgt

SEQ ID NO: 3846 - DNA, 331 bp, Homo sapiens
  misc_feature 251, 294, 307, 326: n = A,T,C or G
acgagtggattgtcagatatgccttgatggaagagagtttgttgcggatgaaatcagccagggccttggtctccttttcagactctgcggcaggtccacagtaagtttcatcacaggggtttcgagaggctccaatttcacaccaaccagcatcaaaatttctgttggggtctgtgccaatgcagctagatccagtatgggtggagcgagtctttctccaaaatcggctcttggtccaggtgtagatgtanccatcaatattgagcacaggcaggacataaaagtctaacttgntgagaagctctgncacttggatctcacgtccntaggt

SEQ ID NO: 3847 - DNA, 411 bp, Homo sapiens
acgccaacgccgccgacatcgactatatagcaggcaccaacaacatggacggccacatcttcgccagcatcgacatgcctgccatcaacaagggcaacaagaaagtcacggaggaggacttctacaagctggtcagtgagttcacaatcaccaaggggctcagaggcgccaagacgacctttgatgtctacaccgagtcctgggcccaggacccatcccaggagaataagaagaagactgtggtggactttgagaccgatgtcctcttcctggtgcccaccgagattgccctagcccagcacagagccaatgccaagagtgccaagacctacgcctacctgttttcccattcctctcggatgcccgtctaccccaaatgggtgggggccgaccatgcagatgacattcagt

SEQ ID NO: 3848 - DNA, 70 bp, Homo sapiens
acgagtggattgtcagatataccttgatggaaaagtttgttgcggatgaactcagccagggccttggtct

SEQ ID NO: 3849 - DNA, 331 bp, Homo sapiens
acctatggacgtgagatccaagtgacagagcttctcaacaagttagacttttatgtcctgcctgtgctcaatattgatggctacatctacacctggaccaagagccgattttggagaaagactcgctccacccatactggatctagctgcattggcacagaccccaacagaaattttgatgctggttggtgtgaaattggagcctctcgaaacccctgtgatgaaacttactgtggacctgccgcagagtctgaaaaggaggccaaggccctggctgatttcatccgcaacaaactctcttccatcaaggcatatctgacaatccactcgt

SEQ ID NO: 3850 - DNA, 234 bp, Homo sapiens
caaggctgaccttgtgaagtatttcatcatcagaaacagctgctcaaatcagcgtgattccaccatccacgtggaggagaatgggcagtcctcggaaagccggttctcagttcagatgttcatgtttgctggacattatgacctagttttcctgcattgtgagattcatctctgtgattctcttaatgaacagtgccagccttcttgctcaagaagtcaagtccgcagtgaagt

SEQ ID NO: 3851 - DNA, 404 bp, Homo sapiens
  misc_feature 398: n = A,T,C or G
accagggtcatggcgtcgtcggcacactttgtctggatcaaggacatgagcagctccgggctacaagtgtccttgggaggagtggtctggatcggtgcgggtgaggtctgcagcctaccaccgcagctggaggcatgaagtgagacaatgctggccagcggtagctccacgaaggatgccacaatgctggcattgagcatccgggcctcccccaggaggccttgaggtgtgtctgggagcttgaagccacgaatgtttttctctggaaagatcttgaaggagtattctccagtggtccagatctgcatgttgtggttggcgtcgatgagccaggacacgtaggggggaccctgcaggatgaggacggcatcgagatccccgggtgcgcagctcagttncacctt

SEQ ID NO: 3852 - DNA, 375 bp, Homo sapiens
  misc_feature 41, 65, 67, 74, 148, 233, 280, 336: n = A,T,C or G
acaagctttttttttttttttttttttttttttttagtganagcagggtcactttattggtatananactgcanagggaccaggggctttagctgttggcagctatggtgtccttaatccagtcccatagttgtagaccttggtgtanactccaggcctgttcttctgggcacagccatagccccaggagacaattccttggagctctccattggagaccacagggccaccanaatcaccctggcaggaatccttgcctccctcgaggaagcccacacanaacatgttgttggtaatctttccagggtaggaggcttcacactcagcctggctcancacaggagcatccaggcactgcagctcgtctgggtagtc

SEQ ID NO: 3853 - DNA, 481 bp, Homo sapiens
ttctcggcgcacggcccagcttccttcaaaatgtctactgttcacgaaatcctgtgcaagctcagcttggagggtgatcactctacacccccaagtgcatatgggtctgtcaaagcctatactaactttgatgctgagcgggatgctttgaacattgaaacagccatcaagaccaaaggtgtggatgaggtcaccattgtcaacattttgaccaaccgcagcaatgcacagagacaggatattgccttcgcctaccagagaaggaccaaaaaggaacttgcatcagcactgaagtcagccttatctggccacctggagacggtgattttgggcctattgaagacacctgctcagtatgacgcttctgagctaaaagcttccatgaaggggctgggaaccgacgaggactctctcattgagatcatctgctccagaaccaaccaggagctgcaggaaattaacagagtctacaaggaaatgt

SEQ ID NO: 3854 - DNA, 205 bp, Homo sapiens
  misc_feature 93: n = A,T,C or G
actcacccaacaccacctggtaggtcagatccctcgagatgcagtggccggcagtcacaacccaatcgggggcgatgaggctaccgccacacntgtggtagaagcttccacttttctcatactgcagggaaacctgccagggccagctgtaggggaccgcatcctcaccattgacaacgcggctggaagggcgagaggaaggtgg

SEQ ID NO: 3855 - DNA, 468 bp, Homo sapiens
  misc_feature 433, 438: n = A,T,C or G
acagtggtccttttcagagttggacttctagactcacctgttctcactccctgttttaattcaacccagccatgcaatgccaaataatagaattgctccctaccagctgaacagggaggagtctgtgcagtttctgacacttgttgttgaacatggctaaatacaatgggtatcgctgagactaagttgtagaaattaacaaatgtgctgcttggttaaaatggctacactcatctgactcattctttattctattttagttggtttgtatcttgcctaaggtgcgtagtccaactcttggtattaccctcctaatagtcatactagtagtcatactccctggtgtagtgtattctctaaaagctttaaatgtctgcatgcagccagccatcaaatagtgaatggtctctctttggctggaattacaaaactnaaagnaatgtgtcatcaggagaacatcataaccca

SEQ ID NO: 3856 - DNA, 535 bp, Homo sapiens
  misc_feature 329, 344, 461: n = A,T,C or G
acttaactacattaacgttctaaaacccagtttggtttacgttgtctttcacagtagtatatttagctcttctctggaaagttgtgggttaatataattcttaaacatgaaaatgtaattaaacacaccacgagagaacaatattccaggagacttaatagtgattactttcttcaatcaggaaatcgtttcagtgcctcctttgtaggaatgctttgttttgtgatgggttttcttaaagaagagcacacctccgtccaatctcctgagacagccacgtctccgctgacatcccactgtgatgctttcagatagtcagtgaatgtttntgataaccttcatcnagtatctgaaacacaatgtgagagattatattgttttagataataacatcccatttagttgactaaaatcttccaaactctgaaagctgcacactgctactccagagagtgcaggtnttagctcttctcctttctgacttcaagatgaatctttgggacgatgtttctggtgcttggtccacagtgattca

SEQ ID NO: 3857 - DNA, 488 bp, Homo sapiens
  misc_feature 442, 444, 450: n = A,T,C or G
cgctgccaaaacatctcgtgttgggctagaccagtcgctcatttatcacttcaagagatacttattgtgtgcctattctgtgccagacactggattagacagtggagaacaagacacataagacagctacaaaacccctgttctagtggaggaaggcagacagtaaagaagcagaacaatagagaatgtaagagccaagtcacaatgaatgctattattattaagtaaaatcaagataagggggaggaaggacaaatctcctctacagaagaatgccaaataatttatggagatatgcgaagacgtttcagaacctaatgtcccattctctaagtgtggcctgtgtttactgactttcttccacagagtatggtatggaaggaggaggaaaagtgacttcacagtggcgaaagctgatgaacattagcttggccaagtattngnagatcnacatcaacagttataagtcatattgatagtatgtgccc

SEQ ID NO: 3858 - DNA, 534 bp, Homo sapiens
actatctggtttgagagtgcccttgaaaatttcatactgcttagagtttcctttatttccgaacaaagaaactagtatgtgtcctgtaaccttttttccagacagtgtgacagataccttatacctccaacgtgcaaaattactggcatcaccagtgtctagataaaatttctggcccacatcatttgttttcccaggatatctatcagcatagtgacccatctgtgggcagcctccacttggacaagggaaacacttgtttgcagtgaagacgttgtaagaggcacaggggaatccagcaaagccatcagggttgacgatgctatcagtgtaatatttgtagcttcttaagtgattacaggccgcaaagtctcgagtcccttcccagattccgtctatgtccacaatctgagagagaatgttctttttacatccaggcatttccactcctccatttggaaagaaatctaggtggcccacgacttggctcattccaaaccccaaattggggactatgggggcaccatccgtgtg

SEQ ID NO: 3859 - DNA, 503 bp, Homo sapiens
actgaagatcagcgatgcaaactcattagggaggagatggtctgaactgagttggagacatagtctagtttaatttttgacttcatagtaattgcaggaccagttctagacatccatttttcagcttcctctagtttttgaacttgcaaacaaaggagaacctcttctcacaagattcatccttccatttcttgaatcctgagcatgaagtcaggcttgcacagtagccagcattagcactgctcggggatccagtgtcccaggacttgtaggagaccagggacccactactccagtgccagcggcggttcttttttgggtcatggaggccaatccagacattgctgtcatcagtgctactctccttaatcagtgaggccacgaaggcaccctccgcctgggtgagcacagacaccaggttgcctgaattcatgttctggcaatagagatctgcatcaacccaggtctcagggtcttcattaaagtagtagcagtaggagcga

SEQ ID NO: 3860 - DNA, 331 bp, Homo sapiens; identical to SEQ ID NO: 2994

SEQ ID NO: 3861 - DNA, 331 bp, Homo sapiens; identical to SEQ ID NO: 3099

SEQ ID NO: 3862 - DNA, 174 bp, Homo sapiens
gtgactgtggccctggcatctgctcatcatggtggtgagcactttgaaggcgagaaggtgttccgtgttaacgttgaagatgaaaatcacattaacataatccgcgagttggccagcacgacccagattgacttctggaagccagattctgtcacacaaatcaaacctcacagt

SEQ ID NO: 3863 - DNA, 120 bp, Homo sapiens
acagcctagcatcccagaaggtaagaatagaggctcctccagccccatgtcctcgttgattgtcatggttatccacaaagacaagcgctctgtcagaaggtacctcggccggaccacgct

SEQ ID NO: 3864 - DNA, 564 bp, Homo sapiens
  misc_feature 464: n = A,T,C or G
actatctggtttgagagtgcccttgaaaatttcatactgcttagagtttcctttatttccgaacaaagaaactagtatgtgtcctgtaaccttttttccagacagtgtgacagataccttatacctccaacgtgcaaaattactggcatcaccagtgtctagataaaatttctggcccacatcatttgttttcccaggatatctatcagcatagtgacccatctgtgggcagcctccacttggacaagggaaacacttgtttgcagtgaagacgttgtaagaggcacaggggaatccagcaaagccatcagggttgacgatgctatcagtgtaatatttgtagcttcttaagtgattacaggccgcaaagtctcgagtcccttcccagattccgtctatgtccacaatctgagagagaatgttctttttacatccaggcatttccactcctccatttggaaagnaaatctaggtggcccacgacttggctcattccaaaccccaaattggggactatgggggcaccatccgtgtgaattacatccacaaatttggcatcgctgg

SEQ ID NO: 3865 - DNA, 214 bp, Homo sapiens
ggctatggcccaccttcctctcgcccttccagccgcgttgtcaatggtgaggatgcggtcccctacagctggccctggcaggtttccctgcagtatgagaaaagtggaagcttctaccacacgtgtggcggtagcctcatcgcccccgactgggttgtgactgccggccactgcatctcgagctcctggacctaccaggtggtgttgggtgagc

SEQ ID NO: 3866 - DNA, 452 bp, Homo sapiens
acaccaaagaggaactggaactcaaggcaagaatgaggacaagaaaaaaagagaataagggctttgttattttcttatttagtaaaggagacaccatccacaaagatgaaagctgacttaggtagaaatgggaaagaccgaaaagttacctaagtgttttaatataacgaaactttctctctttgaggcttgcaagtagagaacagtgaagtgatataattctaactactgtagtaaatttctcagtttttgagtttctaaaggttcactgatatggcagagattgggccaaaaggtcttttcttcatgagaccaccaccataactcactgcttaaaaggagtatgaagggaaattgtgctccccttcccaccccacttaaagaaaaccacctatatacagaggcagagtaatgtggtaactagaaggcctcaactaaaaagagaagtgagt

SEQ ID NO: 3867 - DNA, 254 bp, Homo sapiens
ccggctgctcagttccctcctccttgtggccgttgcctcaggctatggcccaccttcctctcgcccttccagtcgcgttgtcaatggtgaggatgcggtcccctacagctggccctggcaggtttccctgcagtatgagaaaagtggaagcttctaccacacgtgtggcggtagcctcatcgcccccgactgggttgtgactgccggccactgcatctcgagctcctggacctaccaggtggtgttgggcgagt

SEQ ID NO: 3868 - DNA, 421 bp, Homo sapiens
actggtatctgattgttcttacagaaactcaggatgaaaaccgaagaagaggcccggactcatacagagattgaaatgttccttagaaaggagcagcagaaacttgaggagaggctggagttctggatggagaaatacgataaggacacagaaatgaaacagaatgaactaaatgctctcaaagccacaaaggccagtgacttagcacaccttcaagacctggcaaagatgataagagagtatgaacaggtcatcattgaagatcgtatagaaaaggagaggagcaagaagaaggtaaaacaggatctcttggaattaaagagcgttataaagctccaggcctggtggcgaggcactatgatacggagagaaattggtggtttcaagatgcctaaagacaaagttgatagcaaggattcaa

SEQ ID NO: 3869 - DNA, 303 bp, Homo sapiens
actgaatgtcatctgcatggtcggcccccacccatttggggtagacgggcatccgagagggatgggaaaacaggtaggcgtaggtcttggcactcttggcattggctctgtgctgggctagggcaatctcggtgggcaccaggaagaggacatcggtctcaaagtccaccacagtcttcttcttattctcctgggatgggtcctgggcccaggactcagtgtagacatcaaaggtcgtcttggcgcctctgagccccttggtgattgtgaactcactgaccagcttgtagaagtcctcctccg

SEQ ID NO: 3870 - DNA, 163 bp, Homo sapiens
actcattccaatgaatttgactcagatgtggatgttggggacttgcagatggttaaatttatttggtataacaatgtgatcaacccaactttacctagagtgggagcatccaagattatagtggagacaaatgttggaaaacagttcaacttctgtagtccag

SEQ ID NO: 3871 - DNA, 193 bp, Homo sapiens; identical to SEQ ID NO: 3719

SEQ ID NO: 3872 - DNA, 339 bp, Homo sapiens
acggaatggtgtcaatgaatgcaattctatgtatatggacttaactgagatgggcaaatagaaactagctctgggaaggaacatgtgcactacttcaagaaagattggaagcatgtgtggctcatgggaaataaccaggtcttaaacagcacaaactgaattcgtggaccaggaaggtcttaaacagcacaaactgaattcatggaaaaatgacaaatttgagaagtctcccagtaagctggaacttttctggtttggttaacaaaaggtttcttgatttgtttcaagatttaaagccaaaggtgtgggttcatgacttaggtgtcattgcgtgtgggt

SEQ ID NO: 3873 - DNA, 295 bp, Homo sapiens
actcattccaatgaatttgactcagatgtggatgttggggacttgcagatggttaaatttatttggtataacaatgtgatcaacccaactttacctagagtgggagcatccaagattatagtggagacaaatgttggaaaacagttcaacttctgtagtccagaaaccgtcagggaggaagttctgctcaccctcacaccgtgttaggagactactgttatttgaccaatgaattgacttctaataaaatctagtggtgatacaaaaaaaaaaaaaaaaaaaaaaaaaagcttgt

SEQ ID NO: 3874 - DNA, 620 bp, Homo sapiens
  misc_feature 489, 577, 592: n = A,T,C or G
aaatatgcttcctttcaggtggagaacgaccaggagcggttcctgagtgacctgcgtcgtgatgtccagaaggttgttggctttgatgctgtgatgcgggtccggacaagcactggtatccgtgctgtagatttctttggagctttctacatgagcaacacgacagatgtggagctggctgggctagatggggacaaaacagtgactgtggagttcaagcatgacgatcggctcaatgaagagagcggagctctcctgcagtgtgccctgctttacaccagctgtgcagggcagcgtcggctccgcatccataatctggccctgaactgctgcacccagctggctgatctatatcgaaactgtgagactgacacgctcatcaactacatggccaagtttgcatatcggggagtcctgaatagccctgtgaaggctgttcgtgacacgctcatcacccagtgtgcccagatcctggcctgttacagaaangaactgtgctagcccctcctctgcaggacagttgatccttcctgagtgcatgaagctactcccagtttacctgaactgtgtgttgaanagtgatgtcctgcancctggagctgaagtcactactgatgacc

SEQ ID NO: 3875 - DNA, 406 bp, Homo sapiens
  misc_feature 399: n = A,T,C or G
gaggttctggggcgcagaaccgctactgctgcttcggtctctccttgggaaaaaataaaatttgaaccttttggagctgtgtgctaaatcttcagtgggacaatgggttcagacaaaagagtgagtagaacagagcgtagtggaagatacggttccatcatagacagggatgaccgtgatgagcgtgaatcccgaagcaggcggagggactcagattacaaaagatctagtgatgatcggaggggtgatagatatgatgactaccgagactatgacagtccagagagagagcgtgaaagaaggaacagtgaccgatccgaagatggctaccattcagatggtgactatggtgagcacgactataggcatgacatcagtgacgagaggggagagcaagancatcatg

SEQ ID NO: 3876 - DNA, 141 bp, Homo sapiens
acactcaaactttatttggttgcctggatggggccagagaggaggacaagaagggtgtcaaagggtcagctcagtaggggtgattcagggtgtgctccatgatggtcagaagcgccagccacgtctccttggctgtgggga

SEQ ID NO: 3877 - DNA, 505 bp, Homo sapiens
  misc_feature 497: n = A,T,C or G
ggaactgccacgatgctgccactttggactctttcactgctgctgggagcagtagcaggaaaagaagtttgctacgaaagactcggctgcttcagtgatgactccccatggtcaggaattacggaaagacccctccatatattgccttggtctccaaaagatgtcaacacccgcttcctcctatatactaatgagaacccaaacaactttcaagaagttgccgcagattcatcaagcatcagtggctccaatttcaaaacaaatagaaaaactcgctttattattcatggattcatagacaagggagaagaaaactggctggccaatgtgtgcaagaatctgttcaaggtggaaagtgtgaactgtatctgtgtggactggaaaggtggctcccgaactggatacacacaagcctcgcagaacatcaggatcgtgggagcagaagtggcatattttgttgaatttcttcagtcggcgttcggttactcaccttccancgtgcatg

SEQ ID NO: 3878 - DNA, 254 bp, Homo sapiens
actcgcccaacaccacctggtaggtccaggagctcgagatgcagtggccggcagtcacaacccagtcgggggcgatgaggctaccgccacacgtgtggtagaagcttccacttttctcatactgcagggaaacctgccagggccagctgtaggggaccgcatcctcaccattgacaacgcggcctggaagggcgagaggaaggtgggccatagcctgaggcaacggccacaaggaggagggaactgagcagccg

SEQ ID NO: 3879 - DNA, 319 bp, Homo sapiens
acccctcaggaaggccagccaccagctccagcagctcagtgtcaaacactaatacggcactgccgggcacttctccatccacgccagcttccccatagcccaggtgaggcggaatgatcactgtccgtttctcgccaacgcacatctctctgagacccatgtccatccccaacacaacttgcccagatcccagaacaatattgtaagttttgcctaaattccacgtggagtccagcagggtcccatccagaagtgaggcattgtagtgatatttgaggtaatctcccttcttactcagcactgagcagtcagggggttt

SEQ ID NO: 3880 - DNA, 296 bp, Homo sapiens
  misc_feature 34, 71, 151, 156, 168, 200, 217, 246: n = A,T,C or G
acaagcttttttttttttttttttttttttttcnaattttctgagagatctttattctttattcaggatgngggatcgatcagcactgccagctgggccttggttctagtggcttgctatggtctcctcaatccagtcgatgaaggcgganactcnagtgaaaaccgngggcttcctgcgggtgttgcagccaaaggcanaaacaaagctggtcacnccatggacctgccagccaccatcctttgnggggcagttgaggggtcctccaaagtcaccgttgcagccggagcggatgt

SEQ ID NO: 3881 - DNA, 436 bp, Homo sapiens
acccccaagatatcaggccagaaagagatgagtcagttgctgtgctctttacttctttttctccacatcttctgaggctttagaaatgtggacaagctagttttcaaattttgtgtgcgtctgtaagttcttaaagaaccagcttcttagaatgttcagttctcaatgtgctgctgctttcccttctcctaaacattttaaaactcttccctttcacctccaattcccgtgatcccaaaagaagaggaagactccaggaggggtatagattgtgccgtcatagctttacaggtggttttaaagttaacaggggtttgtcatggtgattcactactcagtttatcagctcaaggattatacagctcttttccgggaactcacccaggagcaagcgagacactaccattgaatcagggaatgagaattaagaatggac

SEQ ID NO: 3882 - DNA, 331 bp, Homo sapiens; identical to SEQ ID NO: 3099

SEQ ID NO: 3883 - DNA, 230 bp, Homo sapiens; identical to SEQ ID NO: 3096

SEQ ID NO: 3884 - DNA, 234 bp, Homo sapiens
ccactcctgatccttacctttgttgcagctgctgttgctgccccctttgatgatgatgacaagatcgttgggggctacatctgtgaggagaattctgtcccctaccaggtgtccttgaattctggctaccacttctgcggtggctccctcatcagcgaacagtgggtggtgtcagcaggtcactgctacaagtcccgcatccaggtgagactgggacctcggcccgaccacgct

SEQ ID NO: 3885 - DNA, 331 bp, Homo sapiens; identical to SEQ ID NO: 3009

SEQ ID NO: 3886 - DNA, 561 bp, Homo sapiens
acccataggggaacatcagcagctgggaatagctgtggagggtaatgaaggccttgacttttccatgactcttgatgaagtccactatggatttcacttcaacttcagagttggcactgggtccgtggtatgaatcagagcaagggttgctgctggctccaggtcctccaaaacctgcatcccagttccggttaggatccacaccaacacagaggcttccagataccttggaccgggtcttccgccacatacgatttttggtttgagagaacacgtatccatcagggtttgtgactggcaggaggaagatatccagggcgtccagaatggaagtgatggatgggtcctttccataatcagaaacaatcttatttgctgtccaaagtgccgtagcttgtgtaacccactctcgagcatggatcccagcatccagccagatagctggcttgtctcctccggtgctgaacttgagcacgttcataggccggttctcaaaagaagagccaatattcactttgctcactagaccagggtgctcagccacgaggttatccatttctt

SEQ ID NO: 3887 - DNA, 467 bp, Homo sapiens
  misc_feature 245: n = A,T,C or G
acctgtggaagttacttcaaccctggaagtagggactttccagcagtcccatattctggatgggatttcaatgatggtaaatgtaaaactggaagtggagatatcgagaactacaatgatgctactcaggtcagagattgtcgtctgactggtcttcttgatcttgcactggagaaggattacgtgcgttctaagattgccgaatatatgaaccatctcattgacattggtgttgcagggttcanacttgatgcttccaagcacatgtggcctggagacataaaggcaattttggacaaactgcataatctaaacagtaactggttccctgcaggaagtaaacctttcatttaccaggaggtaattgatctgggtggtgagccaattaaaagcagtgactactttggtaatggccgggtgacagaattcaagtatggtgcaaaactcggcacagttattcgcaagtg

SEQ ID NO: 3888 - DNA, 200 bp, Homo sapiens
  misc_feature 169, 185: n = A,T,C or G
acagagtcttttgcttcctcccacccctagggggaaaaactgctttgtgctttgggaagttgtctctgaaacccggggacagaggacgcaggacagactaggagggagccgggaggatgggctgcagctgtggaggagggtttcagaggagagaggtcggagagcagangcctgagaagccagangcaggtggagagagg

SEQ ID NO: 3889 - DNA, 234 bp, Homo sapiens
acttgatgccctggctgtaggtccagtcaatagtgcttccactggcttgataaattgccttgatgatgctgccatagttgaacttggtcccgtagagagaggccagggctgtcacagcagccttggaaagctgatccagctcatcctggtcagggactggttctgttttgtagccatagggatacatgaggagctgggagtagctgtggatggagatgaaggccttgatgttcc

SEQ ID NO: 3890 - DNA, 499 bp, Homo sapiens
  misc_feature 386: n = A,T,C or G
acctagtcagatggtagacgagctgtctgctgccgcaggagcacctctatacaggacttagaagtagtatgttattcctggttaagcaggcattgctttgccctggagcagctattttaagccatctcagattctgtctaaaggggttttttgggaagacgttttctttatcgccctgagaagatctaccccagggagaatctgagacatcttgcctacttttctttattagctttctcctcattcatttcttttatacctttcctttttggggagttgttatgccatgatttttggtatttatgtaaaaggattattactaattctatttctctatgtttattctagttaaggaaatgttgagggcaagccaccaaattacctangctgaggttagagagattggccagcaaaaactgtgggaagatgaactttgtcattatgatttcattatcacatgattatagaaggctgtcttagtgcaaaaaacatacttaca

SEQ ID NO: 3891 - DNA, 64 bp, Homo sapiens
aaagatgtcaacacccgcttcctcctatatactaatgagaacccaaacaactttcaagaagttg

SEQ ID NO: 3892 - DNA, 331 bp, Homo sapiens; identical to SEQ ID NO: 2994

SEQ ID NO: 3893 - DNA, 516 bp, Homo sapiens
  misc_feature 498, 512: n = A,T,C or G
atcaaacccatgccatctacaaaaacaccctctccttggtcaatgatttcatcatcagagacaccatcctcaacatcaacttccaatgtgcctacccactggacatgaaagtcagcctccaagctgccttgcagcccattgtaagttccctgaacgtcagtgtggacgggaatggagagttcattgtcaggatggccctcttccaagaccagaactacacgaatccttacgaaggggatgcagttgaactgtctgttgagtccgtgctgtatgtgggtgccatcttggaacaaggggacacctcccggtttaacctggtgttgaggaactgctatgccacccccactgaagacaaggctgaccttgtgaagtatttcatcatcagaaacagctgctcaaatcaacgtgattccaccatccacgtggaggagaatgggcagtcctcggaaagccggttctcagttcagatgttcatgtttgctggacattatgacctanttttcctgcattgngaga

SEQ ID NO: 3894 - DNA, 165 bp, Homo sapiens
gttggaaaacagttcaacttctgtagtccagaaaccgtcagggaggaagttctgctcaccctcacaccgtgttaggagactactgttatttgaccaatgaattgacttctaataaaatctagtggtgatgcatgaaaaaaaaaaaaaaaaaaaaaaaaagcttgt

SEQ ID NO: 3895 - DNA, 203 bp, Homo sapiens
acctttgcccagctcaggggtgctgtcatcctaagctctcttggaatcaaattcagcctaggctccttctaaaacaggtctccaatatcctttattattttgcaaacatactcacatgcacacatgcggatacatacatacacacatacatacccacacacacagtgggcaagaggcccaaggggcccacgattatgggtgat

SEQ ID NO: 3896 - DNA, 371 bp, Homo sapiens
acagtttaaaaaagaagatgaggtaacatgaatctcaaagtccacaggaatcctgcctgaagagtttgaacagctgcctgtaattcatttccaatgtgcagggagattaaggtttgccaaaactggattcactggctttcagcatagcaactgcatctttcactgcatggtagataacattcttcacctgtaatttatcttcgtgattggtatgagtctgtgacagatatcggaattcctgagtaagccagaagcattgtttaacatgctctggagaaacaaaatcttcagccactttgatgcagctatataagttatgaacctgatgtggagctcctgccgggataaacaccacatccccaagaaactgt

SEQ ID NO: 3897 - DNA, 513 bp, Homo sapiens
  misc_feature 466, 467: n = A,T,C or G
actatctggtttgagagtgcccttgaaaatttcatactgcttagagtttcctttatttccgaacaaagaaactagtatgtgtcctgtaaccttttttccagacagtgtgacagataccttatacctccaacgtgcaaaattactggcatcaccagtgtctagataaaatttctggcccacatcatttgttttcccaggatatctatcagcatagtgacccatctgtgggcagcctccacttggacaagggaaacacttgtttgcagtgaagacgttgtaagaggcacaggggaatccagcaaagccatcagggttgacgatgctatcagtgtaatatttgtagcttcttaagtgattacaggccgcaaagtctcgagtcccttcccagattccgtctatgtccacaatctgagagagaatgttctttttacatccaggcatttccactcctccatttggaaagaannctaggtggcccacgacttggctcattccaaaccccaaattggggac

SEQ ID NO: 3898 - DNA, 569 bp, Homo sapiens
  misc_feature 458: n = A,T,C or G
aaaaaaacaaaaaacccaaaaacaaaaacaaaaaacaaaaaatgcattgatgtatatttaaaagtgaaaaatccattttcctggaataattctcctctgcctcatatgttgcagttccgttaactggaaatagttttaggtttggactctttttttcaaaaaggaaaaaagcttcatttcgcgggcaggggtttggatggctgtcggtcagtatttgccaagcagtcctggtagttgagtctctggatgtagacagtcattaagcaggactgcaatactgatttttattttattaccaatataaacccttggacttgctagactagaaaagtaatcatcctcctttatgtcataaagcacagctatgtttttgaatgccctttaattgtcatagactattcagaacaaaattaaagcaactataaatgcaagcaactacattggattactgaatttgnattattagcttatttaaaaaataaggtcacctaatcgcctcctttcttcctgtgattgattaatttgtcttgagggtttagttctttcttctggcagaaaagcattactat

SEQ ID NO: 3899 - DNA, 314 bp, Homo sapiens
  misc_feature 306: n = A,T,C or G
tttttgtgagaacagggtcactttattggtatagagactgaagagatactgggggctttagctgttggcagctatggtgttcttaatccatttcacatagttgtagaccttggtgtagactccaggcttgttcttctgggcacagccatcaccccaggagacaactccttggagctgtccattgcagaccacagggccaccagaatcaccctgacatgaatccttgcctccctcaaggaagcccacacagaacatgttgctggtaatctttccagggtaggaggcttcacacttagcctggctcancacaggag

SEQ ID NO: 3900 - DNA, 602 bp, Homo sapiens
accaagcaatgaagaacaaattaaaaatctgctacaattggaggctcaagaacatctccagcttgatttttggaaatcacccaccaccccaggggagacagcccacgtccgagttcccttcgtcaacgtccaggcagtcaaagtgttcttggagtcccagggaattgcctattccatcatgattgaagacgtgcaggtcctgttggacaaagagaatgaagaaatgctttttaataggagaagagaacggagtggtaacttcaattttggggcctaccataccctggaagagatttcccaagaaatggataacctcgtggctgagtaccctggtctagtgagcaaagtgaatattggctcttcttttgagaaccggcctatgaacgtgctcaagttcagcaccggaggagacaagccagctatctggctggatgctgggatccatgctcgagagtgggttacacaagctacggcactttggacagcaaataagattgtttctgattatggaaaggacccatccatcacttccattctggatgccctggatatcttcctcctgccagtcacaaaccctgatggatacgtgttctctcaaccaa

SEQ ID NO: 3901 - DNA, 569 bp, Homo sapiens
tgagagttggttgttactcgcctgcaaaaggcaagttgcttgcaaatgggctaaggtctgaaatcctacctagggggcttctagcttaacctcaagtcctcccgccttggccacgtctctgtgagaactggtctccactgaggagcccgtcttccctccctgggtgtgtccatcagctctgcccaaaccaggctgggagggcagttcccccaggttatagaaggcctttgggctttcctgaatccaggggtgggagtgagcccttccataccacctcacccccaactccatgcaaagaactggattccagaagccacagaagctggaggagccacaccgccatgccctctgtccccccacagtgtccggagccagcagtaacccctgctcggagacttaccacggcaagtttgccaattccgaagtggaggtcaagtccattgtagactttgtgaaggaccatgggaacatcaaggccttcatctccatccacagctactcccagctcctcatgtatccctatggctacaaaacagaaccagtccctgaccaggatgagctggatcagc

SEQ ID NO: 3902 - DNA, 523 bp, Homo sapiens
  misc_feature 504: n = A,T,C or G
gatttgctccttaagcaagagattcactgccgctaagcatggctcagaccaactcgttcttcatgctgatctcctccctgatgttcctgtctctgagccaaggccaggagtcccagacagagctgcctaatccccgaatcagctgcccagaaggcaccaatgcctatcgctcctactgctactactttaatgaagaccctgagacctgggttgatgcagatctctattgccagaacatgaattcaggcaacctggtgtctgtgctcacccaggcggagggtgccttcgtggcctcactgattaaggagagtagcactgatgacagcaatgtctggattggcctccatgacccaaaaaagaaccgccgctggcactggagtagtgggtccctggtctcctacaagtcctgggacactggatccccgagcagtgctaatgctggctactgtgcaagcctgacttcatgctcaggattcaagaaatggaaggatgaatcttgtgagnagaagttctcctttgtttg

SEQ ID NO: 3903 - DNA, 582 bp, Homo sapiens
  misc_feature 580: n = A,T,C or G
acaatttaatttttctgcttgcccaagaaacaaagcttctgtggaaccatggaagaagatgaaaatgagactggcaaagaacaaatgctgaatctgaagaagatttgggcaaataatctgcatacttttaattgggaataagatggaaaatatgaatgctaaatcaaattttttaaaaaatacaccacacgatacaactcaatacaggagtatttcttctcaaattcttctagcaccatcaacattcttcaagtatctgaaatactattaattagcacctttgtattatgaacaaaacaaaacaaggacctcagttcatctctgtctaggtcagcacctaacaatgtggatcacactcatgggaaagtgttttgaggtagtttaaacctttggaagtttgggttttaaacttccctctgtggaagatattcaaaagccacaagtggtgcaaatgtttatggtttttatttttcaatttttattttggttttcttacaaaggttgacattttccataacaggtgtaagagtgttgaaaaaaaattcaaatttttgggggagcggggaaggagttaatgaanct

SEQ ID NO: 3904 - DNA, 360 bp, Homo sapiens
gccacatcttcgccagcatcgacatgcctgccatcaacaagggcaacaagaaagtcacggaggaggacttctacaagctggtcagtgagttcacaatcaccaaggggctcagaggcgccaagacgacctttgatgtctacactgagtcctgggcccaggacccatcccaggagaataagaagaagactgtggtggactttgagaccgatgtcctcttcctggtgcccaccgagattgccctagcccagcacagagccaatgccaagagtgccaagacctacgcctacctgttttcccatccctctcggatgcccgtctaccccaaatgggtgggggccgaccatgcagatgacattcagt

SEQ ID NO: 3905 - DNA, 366 bp, Homo sapiens
gcggcctgtaatcacttaagaagctacaaatattacactgatagcatcgtcaaccctgatggctttgctggattcccctgtgccttttacaacgtcttcactgcaaacaagtgtttcccttgtccaagtggaggctgcccacagatgggtcactatgctgatagatatcctgggaaaacaaatgatgtgggccagaaattttatctagacactggtgatgccagtaattttgcacgttggaggtataaggtatctgtcacactgtctggaaaaaaggttacaggacacatactagtttctttgttcggaaataaaggaaactctaagcagtatgaaattttcaagggcactctcaaaccagatagt

SEQ ID NO: 3906 - DNA, 217 bp, Homo sapiens
  misc_feature 200: n = A,T,C or G
gctccaccgacacttttaactacgccacctaccacaccctggaggagatctatgacttcctggacctgctggtggcggagaacccgcaccttgtcagcaagatccagattggcaacacctatgaagggcgtcccatttacgtgctgaagttcagcacggggggcagtaagcgtccagccatctggatcgacacgggcatncattcccgggagtgggt

SEQ ID NO: 3907 - DNA, 526 bp, Homo sapiens
  misc_feature 497: n = A,T,C or G
cggaactgccacgatgctgccactttggactctttcactgctgctgggagcagtagcaggaaaagaagtttgctacgaaagactcggctgcttcagtgatgactccccatggtcaggaattacggaaagacccctccatatattgccttggtctccaaaagatgtcaacacccgcttcctcctatatactaatgagaacccaaacaactttcaagaagttgccgcagattcatcaagcatcagtggctccaatttcaaaacaaatagaaaaactcgctttattattcatggattcatagacaagggagaagaaaactggctggccaatgtgtgcaagaatctgttcaaggtggaaagtgtgaactgtatctgtgtggactggaaaggtggctcccgaactggatacacacaagcctcgcagaacatcaggatcgtgggagcagaagtggcatattttgttgaatttcttcagtcggcgttcggttactcaccttccnacgtgcatgtcattggccacagcctgggt

SEQ ID NO: 3908 - DNA, 443 bp, Homo sapiens
acgcaaacaccagtaggtgttattgttagaactcgtgcaagcacagaaagatcccaggttccagaacggggctgtctgccagtggttgttgtcatgcgtgaagcaagtgaggccaggcaggctgcactcttcccccttcctctgccgtctcttctccttcctctccttcttcctcctacggttgttctccttgaaaagttgcagtttgctatctacttcctgagcagcctccttgaatgggtgaagatggctctttaatttctcttgcttttttacacctttctctttattgtaatagctttgtttactgcagctacattcctcaggcttccttctcttcagatgtcctctcacttctcttaaattcttaattttatcttgcagagcttcaatctctttgtcaatgtatgccttatggtccttccacgctctggccgattggt

SEQ ID NO: 3909 - DNA, 522 bp, Homo sapiens
  misc_feature 464, 496, 510: n = A,T,C or G
tcgctttattattcatggattcatagacaagggagaagaaaactggctggccaatgtgtgcaagaatctgttcaaggtggaaagtgtgaactgtatctgtgtggactggaaaggtggctcccgaactggatacacacaagcctcgcagaacatcaggatcgtgggaacagaagtggcatattttgttgaatttcttcagtcggcgttcggttactcaccttccaacgtgcatgtcattggccacagcctgggtgcccacgctgctggggaggctggaaggagaaccaatgggaccattggacgcatcacagggttggacccagcagaaccttgctttcagggcacacctgaattagtccgattggaccccagcgatgccaaatttgtggatgtaattcacacggatggtgcccccatagtccccaatttggggtttggaatgagccaagtcgtgggccacctanatttctttccaaatggaggagtggaaatgccntggatgtaaaaagnacattctctctc

SEQ ID NO: 3910 - DNA, 366 bp, Homo sapiens
gctatctggtttgagagtgcccttgaaaatttcatactgcttagagtttcctttatttccgaacaaagaaactagtatgtgtcctgtaaccttttttccagacagtgtgacagataccttatacctccaacgtgcaaaattactggcatcaccagtgtctagataaaatttctggcccacatcatttgttttcccaggatatctatcagcatagtgacccatctgtgggcagcctccacttggacaagggaaacacttgtttgcagtgaagacgttgtaaaaggcacaggggaatccagcaaagccatcagggttgacgatgctatcagtgtaatatttgtagcttcttaagtgattacaggccgc

SEQ ID NO: 3911 - DNA, 215 bp, Homo sapiens
  misc_feature 3, 7, 12, 38, 56, 80, 86, 132, 138, 145, 146, 195, 205: n = A,T,C or G
ttntganctgancaggaaaccccagggccacagccganccccaacctaaacacggnctgagctccaaccttggctggctntacttnaagggcgggtagggccggcatggggctggagggagtcaccccactnttgcanattccanncaaaaaaggagggggcttgggtggtaccactggacatccatcccatgtncctgggagtnttggggttgg

SEQ ID NO: 3912 - DNA, 331 bp, Homo sapiens; identical to SEQ ID NO: 3037

SEQ ID NO: 3913 - DNA, 532 bp, Homo sapiens
  misc_feature 475: n = A,T,C or G
cacggatggtgcccccatagtccccaatttggggtttggaatgagccaagtcgtgggccacctagatttctttccaaatggaggagtggaaatgcctggatgtaaaaagaacattctctctcagattgtggacatagacggaatctgggaagggactcgagactttgcggcctgtaatcacttaagaagctacaaatattacactgatagcatcgtcaaccctgatggctttgctggattcccctgtgcctcttacaacgtcttcactgcaaacaagtgtttcccttgtccaagtggaggctgcccacagatgggtcactatgctgatagatatcctgggaaaacaaatgatgtgggccagaaattttatctagacactggtgatgccagtaattttgcacgttggaggtataaggtatctgtcacactgtctggaaaaaaggttacaggacacatactagtttctttgttcggnaataaaggaaactctaagcagtatgaaattttcaagggcactctcaaaccagatagt

SEQ ID NO: 3914 - DNA, 533 bp, Homo sapiens
  misc_feature 497, 498: n = A,T,C or G
ggaactgccacgatgctgccactttggactctttcactgctgctgggagcagtagcaggaaaagaagtttgctacgaaagactcggctgcttcagtgatgactccccatggtcaggaattacggaaagacccctccatatattgccttggtctccaaaagatgtcaacacccgcttcctcctatatactaatgagaacccaaacaactttcaagaagttgccgcagattcatcaagcatcagtggctccaatttcaaaacaaatagaaaaactcgctttattattcatggattcatagacaagggagaagaaaactggctggccaatgtgtgcaagaatctgttcaaggtggaaagtgtgaactgtatctgtgtggactggaaaggtggctcccgaactggatacacacaagcctcgcagaacatcaggatcgtgggagcagaagtggcatattttgttgaatttcttcagtcggcgttcggttactcaccttccanngtgcatgtcattggccacagcctgggtgcccacgc

SEQ ID NO: 3915 - DNA, 376 bp, Homo sapiens
tcgagactttgcggcctgtaatcacttaagaagctacaaatattacactgatagcatcgtcaaccctgatggctttgctggattcccctgtgcctcttacaacgtcttcactgcaaacaagtgtttcccttgtccaagtggaggctgcccacagatgggtcactatgctgatagatatcctgggaaaacaaatgatgtgggccagaaattttatctagacactggtgatgccagtaattttgcacgttggaggtataaggtatctgtcacactgtctggaaaaaaggttacaggacacatactagtttctttgttcggaaataaaggaaactctaagcagtatgaaattttcaagggcactctcaaaccagatagt

SEQ ID NO: 3916 - DNA, 390 bp, Homo sapiens
  misc_feature 310, 314, 316: n = A,T,C or G
acattaagactaaagttatggatcgttcctgtttggcatagaaatgtgatgactattaacagaaaggggaaaaagatttgccccctatccatcatcagacaggcagacttctcttactaaaccccttatgtggagtgggatgagtgactatttcctgcagaaagatcatgcaacttaaagcaaaaaaaccaaccaacaaaaaaacaaaaacaaaaacaaacttgtgcatattacacatgactgattattgggtgtgcctggcaagactaaatgctgattcgttttcagcgtttgaattaaaagaattccntatncngcagatagataacagtaacaaatattgaactaaaatcgctggcaacattatatattaagggtccatcataaaca

SEQ ID NO: 3917 - DNA, 483 bp, Homo sapiens
actgaaacttttgcttatataaactgtagtttatggagaaaataaagaatttttttgttttttttgaggcaggatctcactctattccccaggctagagtgcgatggcaccatctcggctgattgcaacctccattttccaggaaggctctttaattccccctgattacaaaggttttgtgtgaacataatttggtgtaataaaaaaaaatttacaccacaagagacaaacatactcttcagtgtgtgtggtcataatttgtttgaacgagcccttttaaacttctagatatcattgaaactcctatgttgattaaaaatcatcaaagatctttccagtgagaaggatgaaaatattactgagaatgaagtatcactatttcatgtatgtgcctgtatgtgcttatataacatgctgtaatacaaggtgacatttaggggctgagactgttaacatctgactgtacctcggccggaccacgct

SEQ ID NO: 3918 - DNA, 270 bp, Homo sapiens
caaaactcatgatgctccggctgctcagttccctcctccttgtggccgttgcctcaggctatggcccaccttcctctcactcttccagccgcgttgtccatggtgaggatgcggtcccctacagctggccctggcaggtttccctgcagtatgagaaaagtggaagcttctaccacacgtgtggcggtagcctcatcgcccccgattgggttgtgactgccggccactgcatctcgagggatctgacctaccaggtggtgttgggtgagt

SEQ ID NO: 3919 - DNA, 219 bp, Homo sapiens
acgaacagcctctcttacaaaccacttggcagaatgtaggagaaatccactctctggcatggaaaccacagtccatgaaaatggcaggcttattttgtccagctttgccaaccttcaggaggtaaatagcgcgtccctcaaatgtggttccgataacactgcgagagatgagggctggattctcagtggcgacttgttgagtccaagcctctatcgttc

SEQ ID NO: 3920 - DNA, 362 bp, Homo sapiens
  misc_feature 299, 355: n = A,T,C or G
gtaactgccaccgcgatgccgaaggcgcccaagcagcagccgccggagcccgagtggatcggggacggagagagcacgagcccatcagacaaagtggtgaagaaagggaagaaggacaagaagatcaaaaaaacgttctttgaagagctggcagtagaagataaacaggctggggaagaagagaaagtgctcaaggagaaggagcagcagcagcagcaacagcaacagcagcagcaaaaaaaaagcgagatacccgaaaaggcaggcggaagaaggatgtggatgatgatggagaaganaaagagctcatggagcgtcttaagaagctctcagtgccaaccagtgatgaggaggnatgaagt

SEQ ID NO: 3921 - DNA, 366 bp, Homo sapiens; identical to SEQ ID NO: 3910

SEQ ID NO: 3922 - DNA, 208 bp, Homo sapiens
  misc_feature 5, 31, 49, 79, 118, 125, 131, 139, 161, 166, 198: n = A,T,C or G
ctgancaggaaaccccagggccacagccganccccaacctaaacacggnctgagctccaaccttggctggctatacttnaagggcgggtagggccggcatggggctggagggagtcancccactnttgcanattccacncaaaaaaggagggggcttgggnggtancactggacatccatcccatgtgcctgggagtnttggggttgg

SEQ ID NO: 3923 - DNA, 331 bp, Homo sapiens; identical to SEQ ID NO: 3037

SEQ ID NO: 3924 - DNA, 532 bp, Homo sapiens
cacggatggtgcccccatagtccccaatttggggtttggaatgagccaagtcgtgggccacctagatttctttccaaatggaggagtggaaatgcctggatgtaaaaagaacattctctctcagattgtggacatagacggaatctgggaagggactcgagactttgcggcctgtaatcacttaagaagctacaaatattacactgatagcatcgtcaaccctgatggctttgctggattcccctgtgcctcttacaacgtcttcactgcaaacaagtgtttcccttgtccaagtggaggctgcccacagatgggtcactatgctgatagatatcctgggaaaacaaatgatgtgggccagaaattttatctagacactggtgatgccagtaattttgcacgttggaggtataaggtatctgtcacactgtctggaaaaaaggttacaggacacatactagtttctttgttcggaaataaaggaaactctaagcagtatgaaattttcaagggcactctcaaaccagatagt

SEQ ID NO: 3925 - DNA, 469 bp, Homo sapiens
ggaactgccacgatgctgccactttggactctttcactgctgctgggagcagtagcaggaaaagaagtttgctacgaaagactcggctgcttcagtgatgactccccatggtcaggaattacggaaagacccctccatatattgccttggtctccaaaagatgtcaacacccgcttcctcctatatactaatgagaacccaaacaactttcaagaagttgccgcagattcatcaagcatcagtggctccaatttcaaaacaaatagaaaaactcgctttattattcatggattcatagacaagggagaagaaaactggctggccaatgtgtgcaagaatctgttcaaggtggaaagtgtgaactgtatctgtgtggactggaaaggtggctcccgaactggatacacacaagcctcgcagaacatcaggatcgtgggagcagaagtggcatattttgttgaatttcttc

SEQ ID NO: 3926 - DNA, 376 bp, Homo sapiens; identical to SEQ ID NO: 3915

SEQ ID NO: 3927 - DNA, 389 bp, Homo sapiens
  misc_feature 377: n = A,T,C or G
acattaagactaaagttatggatcgttcctgtttggcatagaaatgtgatgactattaacagaaaggggaaaaagatttgccccctatccatcatcagacaggcagacttctcttactaaaccccttatgtggagtgggatgagtgactatttcctgcagaaagatcatgcaacttaaagcaaaaaaaccaaccaacaaaaaaacaaaaacaaaaacaaacttgtgcatattacacatgactgattattgggtgtgcctggcaagactaaatgctgattcgttttcagcgtttgaattaaaagaattccatatacagcagatagataacagtaacaaatattgaactaaaatcgctggcaacattatatattaaggntccatcataaac

SEQ ID NO: 3928 - DNA, 483 bp, Homo sapiens
  misc_feature 395: n = A,T,C or G
actgaaacttttgcttatataaactgtagtttatggagaaaataaagaatttttttgttttttttgaggcaggatctcactctattccccaggctagagtgcgatggcaccatctcggctgattgcaacctccattttccaggaaggctctttaattccccctgattacaaaggttttgtgtgaacataatttggtgtaataaaaaaaaatttacaccacaagagacaaacatactcttcagtgtgtgtggtcataatttgtttgaacgagcccttttaaacttctagatatcattgaaactcctatgttgattaaaaatcatcaaagatctttccagtgagaaggatgaaaatattactgagaatgaagtatcactatttcatgtatgtgcctntatgtgcttatataacatgctgtaatacaaggtgacatttaggggctgagactgttaacatctgactgtacctcggccggaccacgct

SEQ ID NO: 3929 - DNA, 270 bp, Homo sapiens; identical to SEQ ID NO: 3918

SEQ ID NO: 3930 - DNA, 230 bp, Homo sapiens
acgaacagcctctcttacaaaccactggcagaatgtaggagaaatccactctctggcatggaaaccacagtccatgaaaatggcaggcttattttgtccagctttgccaaccttcaggaggtaaatagcgcgtccctcaaatgtggttccgataacactgcgagagatgagggctggattctcagtggcgacttgttgagtccaagcctctatcgtttcccacttgttgt

SEQ ID NO: 3931 - DNA, 269 bp, Homo sapiens
gtaactgccaccgcgatgccgaaggcgcccaagcagcagccgccggagcccgagtggatcggggacggagagagcacgagcccatcagacaaagtggtgaagaaagggaagaaggacaagaagatcaaaaaaacgttctttgaagagctggcagtagaagataaacaggctggggaagaagagaaagtgctcaaggagaaggagcagcagcagcagcaacagcaacagcagcagcaaaaaaaaagcgagatacccgaaaaggcaggcgg

SEQ ID NO: 3932 - DNA, 213 bp, Homo sapiens
acacatatggcccgggagctacaacaatctatcctgctgctgggggctctgacgaccgggcttatgaccaaggaatcagatattccttcacctttgaacttcgagatacaggcagatatggctttctccttccagaatcccagatccgggctacctgcgaggagaccttcctggcaatcaagtatgttgccagctacgtcctggaacacctgt

SEQ ID NO: 3933 - DNA, 396 bp, Homo sapiens
cagcaggctccctctgtattggcgtggaccccaacaggaactgggacgctggctttgggttgtccggagccagcagtaacccctgctcggagacttaccacggcaagtttgccaattccgaagtggaggtcaagtccattgtagactttgtgaaggaccatgggaacatcaaggccttcatctccatccacagctactcccagctcctcatgtatccctatggctacaaaacagaaccagtccctgaccaggatgagctggatcagctttccaaggctgctgtgacagccctggcctctctctacgggaccaagttcaactatggcagcatcatcaaggcaatttatcaagccagtggaagcactattgactggacctacagccagggcatcaagt

SEQ ID NO: 3934 - DNA, 564 bp, Homo sapiens
  misc_feature 505: n = A,T,C or G
actatctggtttgagagtgcccttgaaaatttcatactgcttagagtttcctttatttccgaacaaagaaactagtatgtgtcctgtaaccttttttccagacagtgtgacagataccttatacctccaacgtgcaaaattactggcatcaccagtgtctagataaaatttctggcccacatcatttgttttcccaggatatctatcagcatagtgacccatctgtgggcagcctccacttggacaagggaaacacttgtttgcagtgaagacgttgtaagaggcacaggggaatccagcaaagccatcagggttgacgatgctatcagtgtaatatttgtagcttcttaagtgattacaggccgcaaagtctcgagtcccttcccagattccgtctatgtccacaatctgagagagaatgttctttttacatccaggcatttccactcctccatttggaaagaaatctaggtggcccacgacttggctcattccaaaccccaantggggactatgggggcaccatccgtgtgaattacatccacaaatttggcatcgctgggg

SEQ ID NO: 3935 - DNA, 366 bp, Homo sapiens; identical to SEQ ID NO: 3905

SEQ ID NO: 3936 - DNA, 352 bp, Homo sapiens
actatgttgggaggacccccaaagtggagcagctctccaacatggtggtgaagtcttgtaaatgtagctgagaccccacgtgcgacagagagaggggagagagaaccaccactgcctgactgcccgctcctcgggaaacacacaagcaacaaacctcactgagaggcctggagcccacaaccttcggctccgggcaaatggctgagatggaggtttccttttggaacatttctttcttgctggctctgagaatcacggtggtaaagaaagtgtgggtttggttagaggaaggctgaactcttcagaacacacagactttctgtgacgcagacagaggggatggggatagagg

SEQ ID NO: 3937 - DNA, 262 bp, Homo sapiens
actcattccaatgaatttgactcagatgtggatgttggggacttgcagatggttaaatttatttggtataacaatgtgatcaacccaactttacctagagtgggagcatccaagattatagtggagacaaatgttggaaaacagttcaacttctgtagtccagaaaccgtcagggaggaagttctgctcaccctcacaccgtgttaggagactactgttatttgaccaatgaattgacttctaataaaatctagtggcgatg

SEQ ID NO: 3938 - DNA, 517 bp, Homo sapiens
acaaggcagctggcaacgttcccttcaagacacagaggagaaatccagatcattctcagcttcccaggcagacccactcagtgatcctgatcagatgaacgaggacaagcgccattcacagggcacattcaccagtgactacagcaagtatctggactccaggcgtgcccaagattttgtgcagtggttgatgaataccaagaggaacaggaataacattgccaaacgtcacgatgaatttgagagacatgctgaagggacctttaccagtgatgtaagttcttatttggaaggccaagctgccaaggaattcattgcttggctggtgaaaggccgaggaaggcgagatttcccagaagaggtcgccattgttgaagaacttggccgcagacatgctgatggttctttctctgatgagatgaacaccattcttgataatcttgccgccagggactttataaactggttgattcagaccaaaatcactgacaggaaataactatatcactattcaaga

SEQ ID NO: 3939 - DNA, 492 bp, Homo sapiens
  misc_feature 375: n = A,T,C or G
aatgagccaagtcgtgggccacctagatttctttccaaatggaggagtggaaatgcctggatgtaaaaagaacattctctctcagattgtggacatagacggaatctgggaagggactcgagactttgcggcctgtaatcacttaagaagctacaaatattacactgatagcatcgtcaaccctgatggctttgctggattcccctgtgcctcttacaacgtcttcactgcaaacaagtgtttcccttgtccaagtggaggctgcccacagatgggtcactatgctgatagatatcctgggaaaacaaatgatgtgggccagaaattttatctagacactggtgatgccagtaattttgcacgttggaggtatanggtatctgtcacactgtctggaaaaaaggttacaggacacatactagtttctttgttcggaataaaggaaactctaagcagtatgaaattttcaagggcactctcaaaccagatagt

SEQ ID NO: 3940 - DNA, 537 bp, Homo sapiens
  misc_feature 498: n = A,T,C or G
cggaactgccacgatgctgccactttggactctttcactgctgctgggagcagtagcaggaaaagaagtttgctacgaaagactcggctgcttcagtgatgactccccatggtcaggaattacggaaagacccctccatatattgccttggtctccaaaagatgtcaacacccgcttcctcctatatactaatgagaacccaaacaactttcaagaagttgccgcagattcatcaagcatcagtggctccaatttcaaaacaaatagaaaaactcgctttattattcatggattcatagacaagggagaagaaaactggctggccaatgtgtgcaagaatctgttcaaggtggaaagtgtgaactgtatctgtgtggactggaaaggtggctcccgaactggatacacacaaacctcgcagaacatcaggatcgtgggagcagaagtggcatattttgttgaatttcttcagtcggcggttcggttactcaccttccnacgtgcatgtcattggccacagcctgggtgcccacgctg

SEQ ID NO: 3941 - DNA, 224 bp, Homo sapiens; identical to SEQ ID NO: 3600

SEQ ID NO: 3942 - DNA, 331 bp, Homo sapiens
  misc_feature 299: n = A,T,C or G
acctatggacgtgagatccaagtgacagagcttctcgacaagttagacttttatgtcctgcctgtgctcaatattgatggctacatctacacctggaccaagagccgattttggagaaagactcgctccacccatactggatctagctgcattggcacagaccccaacagaaattttgatgctggttggtgtgaaattggagcctctcgaaacccctgtgatgaaacttactgtggacctgccgcagagtctgaaaaggagaccaaggccctggctgatttcatccgcaacaaactctnttccatcaaggcatatctgacaatccactcgt

SEQ ID NO: 3943 - DNA, 230 bp, Homo sapiens; identical to SEQ ID NO: 3096

SEQ ID NO: 3944 - DNA, 259 bp, Homo sapiens
acccaggagggcagtggtttggggtccgccacgagcacaaggctcaaccctgggattaggcagctgagtcttggaacctgagcccaggctggacctggcaaaggcgctcagtggtaggagtgccttgtgtcatctcatcccaggtggctcaatagctcccaacagaggtgggtttgtgacagacagccctgtgggtgggagcctcaactggggtgggagcacctgtgaaaacctgaggtggaacaggaggctttaggca

SEQ ID NO: 3945 - DNA, 211 bp, Homo sapiens
gcaggaggcacgcggagtgtgaggccacgcatgagcggacgctaaccccctccccagccacaaagagtctacatgtctagggtctagacatgttcagctttgtggacctccgactcctgctcctcttagcggccaccgccctcctgacgcacggccaagaggaaggccaagtcgagggccaagacgaagacatcccaccaatcacctgcgt

SEQ ID NO: 3946 - DNA, 477 bp, Homo sapiens
atcacactctcagaaactgcggcggctctggactgcagcctcccaaggctccatgccagacaaagcatgcgtgtcacacttgctacaatagcctggatggtttcttttgtctccaattattcacacacagcaaatattttgccagatatcgaaaatgaagatttcatcaaagactgcgttcgaatccataacaagttccgatcagaggtgaaaccaacagccagtgatatgctatacatgacttgggacccggcactagcccaaattgcaaaagcatgggccagcaattgccagttttcacataatacacggctgaagccaccccacaagctgcacccaaacttcacttcactgggagagaacatctggactgggtctgtgcccattttttctgtgtcttccgccatcacaaactggtatgacgaaatccaggactatgacttcaagactcggatatgcaaaaaagtctgtggccac

SEQ ID NO: 3947 - DNA, 524 bp, Homo sapiens
accccaagccactgaccagcctgggactgccccctgatgtccagcgagtggatgccgcctttaactggagcaaaaacaagaagacatacatctttgctggagacaaattctggagatacaatgaggtgaagaagaaaatggatcctggcttccccaagctcatcgcagatgcctggaatgccatccccgataacctggatgccgtcgtggacctgcagggcggcggtcacagctacttcttcaagggtgcctattacctgaagctggagaaccaaagtctgaagagcgtgaagtttggaagcatcaaatccgactggctaggctgctgagctggccctggctcccacaggcccttcctctccactgccttcgatacaccgggcctggagaactagagaaggacccggaggggcctggcagccgtgccttcagctctacagctaatcagcattctcactcctacctggtaatttaagattccagagagtggctcctcccggtgcccaagaatagatgctgactgt

SEQ ID NO: 3948 - DNA, 474 bp, Homo sapiens
tctcggcgcacggcccagcttccttcaaaatgtctactgttcacgaaatcctgtgcaagctcagcttggagggtgatcactctacacccccaagtgcatatgggtctgtcaaagcctatactaactttgatgctgagcgggatgctttgaacattgaaacagccatcaagaccaaaggtgtggatgaggtcaccattgtcaacattttgaccaaccgcagcaatgcacagagacaggatattgccttcgcctaccagagaaggaccaaaaaggaacttgcatcagcactgaagtcagccttatctggccacctggagacggtgattttgggcctattgaagacacctgctcagtatgacgcttctgagctaaaagcttccatgaaggggctgggaaccgacgaggactctctcattgagatcatctgctccagaaccaaccaggagctgcaggaaattaacagagtctacaagg

SEQ ID NO: 3949 - DNA, 492 bp, Homo sapiens
accagggggaccgggagggcctggggggccagctggtccaggatagcctgcgagtcctcctactgctactccagacttgacatcatatgaatcatactggggagaatagttctgaggaccagtagggcatgattcacagattccaggggggccaggagaaccaggggaccctggttgtcctggaataccagggtcaccatttctcccaggaataccaggagggcctggatctcccttggggccttgaggtccttgaccattaggagggcgagtaggagcagttggaggctgtgggcaaactgcacaacattctccaaatggaatttctgggttggggcagtctaattcttgatcgtcacatattatgtcatcgcagagaacggatcctgagtcacagacacatatttggcatggttctggcttccagacatctctatccgcataggactgaccaagatgggaacatcctccttcaacagcttcctgttgtgc

SEQ ID NO: 3950 - DNA, 453 bp, Homo sapiens
  misc_feature 78, 312, 363, 367, 375, 392, 402, 405: n = A,T,C or G
acaagctttttttttttttttttttttttttttttttctggaaaaatgaattttatttatttaattcaaatctttganaaatttacacaaaattgcagtgaaaatgaaggcaacaaaatattttcaaactgaaacacccagccgtcagctattggggatactgtcgagagcaaaaaccaccagtgccagtcagcatctggtaaaggaggttttccagctcggtccaatcccttcattttcttggcaagtaaaaggctgtctcccatttttcaggcaaccttttcatcatttctcatctcttctttcaatgcnccacaagagggcagggttttatcatattctccttgaattatataataccancagnggaatganatgacttccaaaagtanaaattgactnttntgccaaaactgttcaccaaagttgataaaactctaggtttacaattgt

SEQ ID NO: 3951 - DNA, 297 bp, Homo sapiens
actcattccaatgaatttgactcagatgtggatgttggggacttgcagatggttaaatttatttggtataacaatgtgatcaacccaactttacctagagtgggagcatccaagattatagtggagacaaatgttggaaaacagttcaacttctgtagtccagaaaccgtcagggaggaagttctgctcaccctcacaccgtgttaggagactactgttatttgaccaatgaattgacttctaataaaatctagtggtgatgcaaaaaaaaaaaaaaaaaaaaaaaaaaaagcttgt

SEQ ID NO: 3952 - DNA, 262 bp, Homo sapiens
atgatgctccggctgctcagttccctcctccttgtggccgttgcctcaggctatggcccaccttcctctcgcccttccagccgcgttgtcaatggtgaggatgcggtcccctacagctggccctggcaggtttccctgcagtatgagaaaagtggaagcttctaccacacgtgtggcggtagcctcatcgcccccgactgggttgtgactgccggccactgcatctcgagctcctggacctaccaggtggtgttgggcgagt

SEQ ID NO: 3953 - DNA, 174 bp, Homo sapiens
  misc_feature 39, 45, 57, 94, 129, 146, 166: n = A,T,C or G
acaagctttttttttttttttttttttttttttttattnacaacntgcacaaaggcntgtattgcaggggaggtgggagggggcaagcaaaacnctcctcctcctgggtcttggggccccggagcaaancccagggatgggctgantgaggggtttggcactctgnggaagctg

SEQ ID NO: 3954 - DNA, 154 bp, Homo sapiens
cttttttttttttttttttttggtttgcaggaggcctttaattgtgaagagcgcaatcagaaaacagatatgctggtcaaggaggtggccagcccgggagatgcgctggagcaagggagagatgcccctgcgcctagtggcctacagcattctg

SEQ ID NO: 3955 - DNA, 537 bp, Homo sapiens
  misc_feature 439: n = A,T,C or G
ctctgtctgacctgacaagccacctcaagtggacaaggcacttaccaacagagattgctgatttgctccttaagcaagagattcactgccgctaagcatggctcagaccaactcgttcttcatgctgatctcctccctgatgttcctgtctctgagccaaggccaggagtcccagacagagctgcctaatccccgaatcagctgcccagaaggcaccaatgcctatcgctcctactgctactactttaatgaagaccctgagacctgggttgatgcagatctctattgccagaacatgaattcaggcaacctggtgtctgtgctcacccaggcggagggtgccttcgtggcctcactgattaaggagagtagcactgatgacagcaatgtctggattggcctccatgacccaaaaagaaccgccgctggcactggagtnagtgggtccctggtctcctacaagtcctgggacactggatccccgagcagtgctaatgctggctactgtgcaagcctgacttcatgctcaggattcaa

SEQ ID NO: 3956 - DNA, 331 bp, Homo sapiens; identical to SEQ ID NO: 3037

SEQ ID NO: 3957 - DNA, 230 bp, Homo sapiens; identical to SEQ ID NO: 3096

SEQ ID NO: 3958 - DNA, 540 bp, Homo sapiens
acttgatgccctggctgtaggtccagtcaatagtgcttccactggcttgataaattgccttgatgatgctgccatagttgaacttggtcccgtagagagaggccagggctgtcacagcagccttggaaagctgatccagctcatcctggtcagggactggttctgttttgtagccatagggatacatgaggagctgggagtagctgtggatggagatgaaggccttgatgttcccatggtccttcacaaagtctacaatggacttgacctccacttcggaattggcaaacttgccgtggtaagtctccgagcaggggttactgctggctccggacaacccaaagccagcgtcccagttcctgttggggtccacgccaatacagagggagcctgctgtgtgggaccgagtcttgcgccacatgcgattcgtgctgtgcgtgaaggcaaagccatcagggttggtgacgatctccaggaagatgtccaaggtgtcgagaatggcggtgaaagctgcatcctgcccgtagtcttgagtgatct

SEQ ID NO: 3959 - DNA, 389 bp, Homo sapiens
  misc_feature 83, 116, 144, 160, 179, 191, 199, 226, 229, 246, 249, 262,268, 277, 297, 303, 316, 367, 371: n = A,T,C or G
acaagcttttttttttttttttttttttttttggatatcgatctcttttaacttttaggccaattttgagtagtcaaagtcanagcagtcaatctgggttgtgagccgaggcaaanctgcaaaagcgtgtctgaggtgtccggnggaggtggcagccganctctgggactaatcaccgngctggggacggnaccgcgtnaggatgcaggtagatccctgcaaaagngtntaaaattcacactcctnttntggagggacgtcnatggtnttaggatanaagcaccaggggaccccacnaacggngtcgtcgaaacancagcccttatttgcacactgggagggcgtgacaccaggaaaaccacaattntgtntttacggggggccactgt

SEQ ID NO: 3960 - DNA, 331 bp, Homo sapiens; identical to SEQ ID NO: 2994

SEQ ID NO: 3961 - DNA, 213 bp, Homo sapiens; identical to SEQ ID NO: 3148

SEQ ID NO: 3962 - DNA, 263 bp, Homo sapiens
ttggggacttgcagatggttaaatttatttggtataacaatgtgatcaacccaactttacctagagtgggagcatccaagattatagtggagacaaatgttggaaaacagttcaacttctgtagtccagaaaccgtcagggaggaagttctgctcaccctcacaccgtgttaggagactactgttatttgaccaatgaattgacttctaataaaatctagtggtgatacaaaaaaaaaaaaaaaaaaaaaaaaaaaagcttgt

SEQ ID NO: 3963 - DNA, 460 bp, Homo sapiens
tccaaatggaggagtggaaatgcctggatgtaaaaagaacattctctctcagattgtggacatagacggaatctgggaagggactcgagactttgcggcctgtaatcacttaagaagctacaaatattacactgatagcatcgtcaaccctgatggctttgctggattcccctgtgcctcttacaacgtcttcactgcaaacaagtgtttcccttgtccaagtggaggctgcccacagatgggtcactatgctgatagatatcctgggaaaacaaatgatgtgggccagaaattttatctagacactggtgatgccagtaattttgcacgttggaggtataaggtatctgtcacactgtctggaaaaaaggttacaggacacatactagtttctttgttcggaaataaaggaaactctaagcagtatgaaattttcaagggcactctcaaaccagatagt

SEQ ID NO: 3964 - DNA, 506 bp, Homo sapiens
  misc_feature 450: n = A,T,C or G
acaaacaacccaaatgtccatcagctgatgaatggatacataaaatgcgacatatccatatgatagaatattatttggcaataaaaaggaatgagatgctgattcatgccacagctgggatgcaccttgaaaatatactcagtgaaaaagaccacatgtatgattccatttatatgaaatgtctagcatgggcaaatctatagagatggagagtagattagtggttacctagagttgtgagaaaacagagtgaatactaacgggcatagggtttcttttgggggtgagaaaaatgatagttgcacaactctgaatatagtaaacactactgaattgtatactgtataggtgaattgtgtggcatgtgaattatatctcaataaagcagttattaaaaaaaaatgaagagaatttcagatagaaaccacaggagagagccactgagtgcanaagcctgttgaggtaaaactgcagacctgcgtgggtggggcttactcgggaaacac

SEQ ID NO: 3965 - DNA, 534 bp, Homo sapiens
  misc_feature 518, 526, 530, 531: n = A,T,C or G
accggttggaaggcacttcctggtgtaatctgagatactgcacagacccatccactgtggaggacaagtgtgagaaggcctgccgccccgaggaggagtgccttgccctcaacagcacctggggctgtttctgcagacaggacctcaatagttctgatgtccacagtttgcagcctcagctagactgtgggcccagggagatcaaggtgaaggtggacaaatgtttgctgggaggcctgggtttgggggaggaggtcattgcctacctgcgagacccaaactgcagcagcatcttgcagacagaggagaggaactgggtatctgtggccagccccgtccaggctagtgcctgcaggaacattctggagagaaatcaaacccatgccatctacaaaaacaccctctccttggtcaatgatttcatcatcagagacaccatcctcaacatcaacttccaatgtgcctacccactggacatgaaagtcagcctccaagctgccttgcagcccattgtaagntccctgancgtnngtg

SEQ ID NO: 3966 - DNA, 542 bp, Homo sapiens
  misc_feature 488, 530: n = A,T,C or G
actcagtggcccagacaccccccgaacactggcactgccacaaggccctgaagggtagactgtggggcaaagaggacaaactctccctcccctaagggacccggctcactgggcctccttcccctgccaaccgccagcccctgcatgcctagcagggaggtaagcacccactggcgtcgtgatttccattatcttgctaatgttgacagcacctaagtcacattaaaacaaagagagactggatccagacctccaagtctcatcattggacctcagtggttctcactgccccaaccacagagtgaaggtcaggcagcgtttgccaggatttggctctgaccaagttagtgctctaacaagtcacctgagtttctaatagcttccctgaagaacccaactatttggagtatgttgcctctcctatcaagaggcatctgggggcacaaaaatctttctggatcacagctttgaagaaacagaacataacnggagtagcttcagaactaaggcggccacattcaccccaccgnttaggagttagc

SEQ ID NO: 3967 - DNA, 213 bp, Homo sapiens; identical to SEQ ID NO: 3148

SEQ ID NO: 3968 - DNA, 331 bp, Homo sapiens; identical to SEQ ID NO: 3099

SEQ ID NO: 3969 - DNA, 331 bp, Homo sapiens
acctatggacgtgagatccaagtgacagagcttctcaacaagttagacttttatgtcctgcctgtgctcaatattgatggctacatctacacctggaccaagagccgattttggagaaagactcgctccacccatactggatctagctgcattggcacagaccccaacagaaattttgatgctggttggcgtgaaattggagcctctcgaaacccctgtgatgaaacttactgtggacctgccgcagagtctgaaaaggagaccaaggccctggctgatttcatccgcaacaaactctcttccatcaaggcatatctgacgatccactcgt

SEQ ID NO: 3970 - DNA, 213 bp, Homo sapiens; identical to SEQ ID NO: 3148

SEQ ID NO: 3971 - DNA, 252 bp, Homo sapiens
  misc_feature 189, 191, 209, 210: n = A,T,C or G
catcaagcatcagtggctccaatttcaaaacaaatagaaaaactcgctttattattcatggattcatagacaagggagaagaaaactggctggccaatgtgtgcaagaatctgttcaaggtggaaagtgtgaactgtatctgtgtggactggaaaggtggctcccgaactggatacacacaagcctcgnanaacatcaggatcgtgggnncagaagtggcatattttgttgaatttcttcagtcggcgttcg

SEQ ID NO: 3972 - DNA, 207 bp, Homo sapiens; identical to SEQ ID NO: 2996

SEQ ID NO: 3973 - DNA, 213 bp, Homo sapiens; identical to SEQ ID NO: 3148

SEQ ID NO: 3974 - DNA, 521 bp, Homo sapiens
acctgtggaagttacttcaaccctggaagtagggactttccagcagtcccatattctgaatgggatttcaatgatggtaaatgtaaaactggaagtggagatatcgagaactacaatgatgctactcaggtcagagattgtcgtctgactggtcttcttgatcttgcactggagaaggattacgtgcgttctaagattgccgaatatatgaaccatctcattgacattggtgttgcagggttcagacttgatgcttccaagcacatgtggcctggagacataaaggcaattttggacaaactgcataatctaaacagtaactggttccctgcaggaagtaaacctttcatttaccaggaggtaattgatctgggtggtgagccaattaaaagcagtgactactttggtaatggccgggtgacagaattcaagtatggtgcaaaactcggcacagttattcgcaagtggaatggagagaagatgtcttacttaaagaactggggagaaggttggggtttcgt

SEQ ID NO: 3975 - DNA, 517 bp, Homo sapiens
  misc_feature 187, 188, 332: n = A,T,C or G
acattagcaccataacatgcgtctttaaagccttcccaaatattagtaatcttgaccagcaatgacaagaaaaaagaggagcacctttacaagcagttgatatccaatattaaaataattgtggctttaaaaatatttctttaaattcttgcattacacttttctttttaaaccaatcttccaggannattaatcaatgaaatttataagttttatcaacgtataaaatttttttcatcttctgggactcatagaatacaatctgtgtttctgaccagttgaggtagttaaaatagggagggcttttctaatttcgtatttgactatttcanaaagaaaggttatcttttactggtgagcacagtcattgctctgcagatgggctaggattcaaagaatataacacagtgttgttatcataaagagtgttgaagtttatttattatagcaccattgagacattttgaaattggaattggtaaaaaaataaaacaaaaagcatttgaattgtatttgg

SEQ ID NO: 3976 - DNA, 250 bp, Homo sapiens
  misc_feature 240: n = A,T,C or G
actcattccaatgaatttgactcagatgtggatgttggggacttgcagatggttaaatttatttggtataacaatgtgatcaacccaactttacctagagtgggagcatccaagattatagtggagacaaatgttggaaaacagttcaacttctgtagtccagaaaccgtcagggaggaagttctgctcaccctcacaccgtgttaggagactactgttatttgaccaatgaattgactnctaataaaat

SEQ ID NO: 3977 - DNA, 486 bp, Homo sapiens
acttgatgccctggctgtaggtccagtcaatagtgcttccactggcttgatctggggcaggagtaaaataggagagaaagggtcaatcactttgggaatatttacacgggttgggttaacgatccaaccctgtccaaagctctgtgccttgtgcaatgctgagtggagtcagtgtctactaaggtctgctgttgaccaagcagcctcacttccaagaaactcccactaaaaggtctaagccaagaggtccaaagaggagaccagcaatggttcccctattcactaggggatgcaaggaagtctctgcaattgcacaagcccctctgaaaacagcctctgtccaacagccctttcggtgaagcccctaaatataccgagttccctgcttgggtaaccaggatttgttcccctggggctctggtctgtgagggggaaagtgcaaagagccagagtcaaagcaaaagccccttgtctttcttttaggag

SEQ ID NO: 3978 - DNA, 411 bp, Homo sapiens
  misc_feature 109, 110: n = A,T,C or G
acgccaacgccgccgacatcgactatatagcaggcaccaacaacatggacggccacatcttcgccagcatcgacatgcctgccatcaacaagggcaacaagaaagtcanngaggaggacttctacaagctggtcagtgagttcacaatcaccaaggggctcagaggcgccaagacgacctttgatgtctacaccgagtcctgggcccaggacccatcccaggagaataagaagaagactgtggtggactttgagaccgatgtcctcttcctggtgcccaccgagattgccctagcccagcacagagccaatgccaagagtgccaagacctacgcctacctgttttcccatccctctcggatgcccgtctaccccaaatgggtgggggccgaccatgcagatgacattcagt

SEQ ID NO: 3979 - DNA, 281 bp, Homo sapiens
  misc_feature 93, 107, 189, 216, 235, 238, 253, 256, 267: n = A,T,C or G
actatgaacaccagaacagaagagattttttactattatgacacaaacacagggaaagagggcaaactagacattgtaatgcataagatgcangaaaaagtgcagancattaactataacccttttgaccagaaactttatgtctataacgatggttaccttctgaattatgatctttctgtcttgcanaagcctcagtaagctgtttaggagttngggtgaaagagaaaatgtntgntgaaaaaatagtctnctncacttacttanatatctgcaggggt

SEQ ID NO: 3980 - DNA, 543 bp, Homo sapiens
actatctggtttgagagtgcccttgaaaatttcatactgcttagagtttcctttatttccgaacaaagaaactagtatgtgtcctgtaaccttttttccagacagtgtgacagataccttatacctccaacgtgcaaaattactggcatcaccagtgtctagataaaatttctggcccacatcatttgttttcccaggatatctatcagcatagtgacccatctgtgggcagcctccacttggacaagggaaacacttgtttgcagtgaagacgttgtaagaggcacaggggaatccagcaaagccatcagggttgacgatgctatcagtgtaatatttgtagcttcttaagtgattacaggccgcaaagtctcgagtcccttcccagattccgtctatgtccacaatctgagagagaatgttctttttacatccaggcatttccactcctccatttggaaagaaatctaggtggcccacgacttggctcattccaaaccccaaattggggactatgggggcaccatccgtgtgaattacatc

SEQ ID NO: 3981 - DNA, 427 bp, Homo sapiens
acttgggatatagccatgaatgaaataagcaaagatcagggaactttctagccagggagaccaacaatgaacataaataagtaaatgatacagtatgtgaggtgacgaatgctggggaggaaaactaaaactagaccaggtgaggtgaatcgggaacactgggggtggaggtggggcaggtgggttgaagggtgggcctcattgacagagtgacatttgggcaactattgaaggaagtgggtggaggaggtggcagccaggaggctatccagctaggaagagccttccaggcagaggaacattctagagcaaaggctctacagtgtggtctggccggggatgttgctggaacaacaagactggtgtggctgcctccaagtaagtgaaggtcaaagctgggtagaaggctgagggggcagggctgcgt

SEQ ID NO: 3982 - DNA, 524 bp, Homo sapiens
acattagcaccataacatgcgtctttaaagccttcccaaatattagtaatcttgaccagcaatgacaagaaaaaagaggagcacctttacaagcagttgatatccaatattaaaataattgtggctttaaaaatatttctttaaattcttgcattacacttttctttttaaaccaatcttccaggagattaatcaatgaaatttataagttttatcaacgtataaaatttttttcatcttctgggactcatagaatacaatctgtgtttctgaccagttgaggtagttaaaatagggagggcttttctaatttcgtatttgactatttcagaaagaaaggttatcttttactggtgagcacagtcattgctctgcagatgggctaggattcaaagaatataacacagtgttgttatcataaagagtgttgaagtttatttattatagcaccattgagacattttgaaattggaattggtaaaaaaataaaacaaaaagcatttgaattgtatttggtggaacag

SEQ ID NO: 3983 - DNA, 411 bp, Homo sapiens; identical to SEQ ID NO: 3418

SEQ ID NO: 3984 - DNA, 526 bp, Homo sapiens
taattcacacggatggtgcccccatagtccccaatttggggtttggaatgagccaagtcgtgggccacctagatttctttccaaatggaggagtggaaatgcctggatgtaaaaagaacattctctctcagattgtggacatagacggaatctgggaagggactcgagactttgcggcctgtaatcacttaagaagctacaaatattacactgatagcatcgtcaaccctgatggctttgctggattcccctgtgcctcttacaacgtcttcactgcaaacaagtgtttcccttgtccaagtggaggctgcccacagatgggtcactatgctgatagatatcctgggaaaacaaatgatgtgggccagaaattttatctagacactggtgatgccagtaattttgcacgttggaggtataaggtatctgtcacactgtctggaaaaaaggttacaggacacatactagtttctttgttcggaaataaaggaaactctaagcagtatgaaattttcaagggcactct

SEQ ID NO: 3985 - DNA, 431 bp, Homo sapiens
gtaaaaagaacattctctctcagattgtggacatagacggaatctgggaagggactcgagactttgcggcctgtaatcacttaagaagctacaaatattacactgatagcatcgtcaaccctgatggctttgctggattcccctgtgcctcttacaacgtcttcactgcaaacaagtgtttcccttgtccaagtggaggctgcccacagatgggtcactatgctgatagatatcctgggaaaacaaatgatgtgggccagaaattttatctagacactggtgatgccagtaattttgcacgttggaggtataaggtatctgtcacactgtctggaaaaaaggttacaggacacatactagtttctttgttcggaaataaaggaaactctaagcagtatgaaattttcaagggcactctcaaaccagatagt

SEQ ID NO: 3986 - DNA, 363 bp, Homo sapiens
  misc_feature 330, 339: n = A,T,C or G
actatctggtttgagagtgcccttgaaaatttcatactgcttagagtttcctttatttccgaacaaagaaactagtatgtgtcctgtaaccttttttccagacagtgtgacagataccttatacctccaacgtgcaaaattactggcatcaccagtgtctagataaaatttctggcccacatcatttgttttcccaggatatctatcagcatagtgacccatctgtgggcagcctccacttggacaagggaaacacttgtttgcagtgaagacgttgtaagaggcacaggggaatccagcaaagccatcagggttgacgatgctatcagngtaatattngtagcttcttaagtgattacaggc

SEQ ID NO: 3987 - DNA, 589 bp, Homo sapiens
acacttgaaaccaaatttctaaaacttgtttttcttaaaaaatagttgttgtaacattaaaccataacctaatcagtgtgttcactatgcttccacactagccagtcttctcacacttcttctggtttcaagtctcaaggcctgacagacagaagggcttggagattttttttctttacaattcagtcttcagcaacttgagagctttcttcatgttgtcaagcaacagagctgtatctgcaggttcgtaagcatagagacggtttgaatatcttccagtgatatcggctctaactgtcagagatgggtcaacaaacataatcctggggacatactggccatcaggagaaaggtgtttgtcagttgtttcataaaccagattgaggaggacaaactgctctgccaatttctggatttctttattttcagcaaacactttctttaaagcttgactgtgtgggcactcatccaagtgatgaataatcatcaagggtttgttgcttgtcttggatttatatagagcttcttcatatgtctgagtccagatgagttggtcaccccaacctctggagagggtctggggcagttt

SEQ ID NO: 3988 - DNA, 307 bp, Homo sapiens
gtcacggaggagggcttctacaagctggtcagtgagttcacaatcaccaaggggctcagaggcgccaagacgacctttgatgtctacaccgagtcctgggcccaggacccatcccaggagaataagaagaagactgtggtggactttgagaccgatgtcctcttcctggtgcccaccgagattgccctagcccagcacagagccaatgccaagagtgccaagacctacgcctacctgttctcccatccctctcggatgcccgtctaccccaaatgggtgggggccgaccatgcagatgacattcagt

SEQ ID NO: 3989 - DNA, 411 bp, Homo sapiens; identical to SEQ ID NO: 3041

SEQ ID NO: 3990 - DNA, 507 bp, Homo sapiens
  misc_feature 443, 447, 470, 472: n = A,T,C or G
gtggaaagtgtgaactgtatctgtgtggactggaaaggtggctcccgaactggatacacacaagcctcgcagaacatcaggatcgtgggagcagaagtggcatattttgttgaatttcttcagtcggcgttcggttactcaccttccaacgtgcatgtcattggccacagcctgggtgcccacgctgctggggaggctggaaggagaaccaatgggaccattggacgcatcacagggttggacccagcagaaccttgctttcagggcacacctgaattagtccgattggaccccagcgatgccaaatttgtggatgtaattcacacggatggtgcccccatagtccccaatttggggtttggaatgagccaagtcgtgggccacctagatttctttccaaatggaggagtggaaatgcctggatgtaaaaagaacattctctntcanattgtggacatagacggaatctngngaagggactcgagactttgcggcctgtaatcactt

SEQ ID NO: 3991 - DNA, 442 bp, Homo sapiens
ccgaactggatacacacaagcctcgcagaacatcaggatcgtgggagcagaagtggcatattttgttgaatttcttcagtcggcgttcggttactcaccttccaacgtgcatgtcattggccacagcctgggtgcccacgctgctggggaggctggaaggagaaccaatgggaccattggacgcatcacagggttggacccagcagaaccttgctttcagggcacacctgaattagtccgattggaccccagcgatgccaaatttgtggatgtaattcacacggatggtgcccccatagtccccaatttggggtttggaatgagccaagtcgtgggccacctagatttctttccaaatgggggagtggaaatgcctggatgtaaaaagaacattctctctcagattgtggacatagacggaatctgggaagggactcgagac

SEQ ID NO: 3992 - DNA, 331 bp, Homo sapiens; identical to SEQ ID NO: 3009

SEQ ID NO: 3993 - DNA, 512 bp, Homo sapiens
cttgctcatccttacggatttacacgagtaatgtcaagctaccgttggccaagacagtttcaaaatggaaacgatgttaatgattgggttgggccaccaaataataatggagtaattaaagaagttactattaatccagacactacttgtggcaatgactgggtctgtgaacatcgatggcgccaaataaggaacatggttattttccgcaatgtagtggatggccagccttttacaaattggtatgataatgggagcaaccaagtggcttttgggagaggaaacagaggattcattgttttcaacaatgatgactggtcattttctttaactttgcaaactggtcttcctgctggcacatactgtgatgtcatttctggagataaaattaatggcaattgcgcaggcattaaaatttacgtttctgatgatggcaaagctcatttttctattagtaactctgctgaagatccatttattgcaattcatgctgaatctaaattgtaaaattt

SEQ ID NO: 3994 - DNA, 472 bp, Homo sapiens
cgcagattcatcaagcatcagtggctccaatttcaaaacaaatagaaaaactcgctttattattcatggattcatagacaagggagaagaaaactggctggccaatgtgtgcaagaatctgttcaaggtggaaagtgtgaactgtatctgtgtggactggaaaggtggctcccgaactggatacacacaagcctcgcagaacatcaggatcgtgggagcagaagtggcatattttgttgaatttcttcagtcggcgttcggttactcaccttccaacgtgcatgtcattggccacagcctgggtgcccacgctgctggggaggctggaaggagaaccaatgggaccattggacgcatcacagggttggacccagcagaaccttgctttcagggcacacctgaattagtccgattggaccccagcgatgccaaatttgtggatgtaattcacacggatggtgcccccatagtc

SEQ ID NO: 3995 - DNA, 424 bp, Homo sapiens
aaatttttgaagtctgatgtaactattttgaatttttagaaaaccatgattatttaccaagaattggagtttctcttctgtaagcaataaagaaaaataaagttcagccacatcttcactagagaaaataaaaatgaaaacaaggaaaaacaaagttttacatgttgtttgatgcaaagagtggagaacttggataggaatggatattcactcctgaattctaaccataggctgaaatctacctccaaagagataggctgagtttgcttttggatccaagtgcaccagtcatgactgtgttgaccttattcacgtggcttattacagaccagtaatggaccatttttttcagttgctggcctggcagttttgttttggagacaattttttatttctgtgcattagccctgggcacacacctggc

SEQ ID NO: 3996 - DNA, 525 bp, Homo sapiens
acaaaaagggctacattctaaatagtaaaaaaatatgcaaactgaggtataaataagattatattctgtgtatcagtgactctagaggttaaaaatgactgagaaaatagacagttcttcaggaaaacaccttctttggactcacaccatgtgttttccattcaaattagtaatgttcaatttttcctgcagttgaaccagctattagctttctggagagtcaaaattctcttcgttttaggatcaaatttgtattgtcttgttccatgaaagaaatagaaaaatccatctttcatgaaaactgcatcaactttgtggccaattccaggaaagtcatgtgctatcattttgggataacctggatccatagatcgtttatattcatcatacctccagtatttgttagcaacaaagaagtaggtttttccagtgttttcctcagaaagagcagcatcgatatgcttcacagttctagggaagccaaaggagctgtagatgtccttggggtatccgtgtagcacattc

SEQ ID NO: 3997 - DNA, 207 bp, Homo sapiens; identical to SEQ ID NO: 2996

SEQ ID NO: 3998 - DNA, 305 bp, Homo sapiens
  misc_feature 35, 37, 141, 158, 168, 190, 233, 259, 303: n = A,T,C or G
acaagcttttttttttttttttttttttttttgananatctttattctttattcaggatgtgggatcgatcagcactgccagctgggccttggttctagtggcttgctatggtctcctcaatccagtcgatgaaggcgganactcgagtgaacaccgngggcttccanatgaagttgcagccaaagccanaaacaaagctggtcacaccgtggacctgccagccaccatcctntgtggggcagttgaggggtcctccanagtcaccgttgcagccggagcggatgtacctcggcgcgaccacnct

SEQ ID NO: 3999 - DNA, 355 bp, Homo sapiens
  misc_feature 208: n = A,T,C or G
accttttaattgcatgggtagttttaaataaatggagaaagcacctttcagaagctacactagcaggaaaaaattccatcaagcatttacatagtaaatttctataatttcacaaaagattcttgatcttacttgaagtatacatgagggaaagagccccctcagcaggtgttcccgttgcttacagaagcaaactaaaggacctaanactggaggcaagccaggatgccaaaaagggggaagagaaatgataaagaaccattcataaattccatgtctacttcaagacatttgtctaatgacccttacataataagtattttagggaaaactaccacccttttaagataaaagt

SEQ ID NO: 4000 - DNA, 207 bp, Homo sapiens; identical to SEQ ID NO: 2996

SEQ ID NO: 4001 - DNA, 261 bp, Homo sapiens
gggacttgcagatggttaaatttatttggtataacaatgtgatcaacccaactttacctagagtgggagcatccaagattatagtggagacaaatgttggaaaacagttcaacttctgtagtccagaaaccgtcagggaggaagttctgctcaccctcacaccgtgttaggagactactgttatttgaccaatgaattgacttctaataaaatctagtggtgatgcaaaaaaaaaaaaaaaaaaaaaaaaaaaaagcttgt

SEQ ID NO: 4002 - DNA, 448 bp, Homo sapiens
acggcttcctgtgctgcttgtgtcaaatggaacctgccctctaaagcactttctttcctttacttgcgtggtttcatgtaagctgtgctgtttagaaacaacatctcagactttacaaagaaatgacaaagaaggcaattgcactttttaagggatatcgacaagcagtttctgttttctaaaggacaaaatacagagtgtgtgtcatttttaattagattctttcccctgctgagttggaaattccagtgcagcactgattgaccacagttgccaatctaaaagcacaaagacagaagtaaagctttatgctaattttatttcaatatgatagaaaatttatcttggtatgtccttttttagataactccagcaggaaactgtaactgctatgtctttaggaaaatgtagaagaaagaacattattattctttaattcctacaaggt

SEQ ID NO: 4003 - DNA, 291 bp, Homo sapiens
  misc_feature 277, 278, 284, 290: n = A,T,C or G
actcattccaatgaatttgactcagatgtggatgttggggacttgcagatggttaaatttatttggtataacaatgtgatcaacccaactttacctagagtgggagcatccaagattatagtggagacaaatgttggaaaacagttcaacttctgtagtccagaaaccgtcagggaggaagttctgctcaccctcacaccgtgttaggagactactgttatttgaccaatgaattgacttctaataaaatctagtggtgatgcacaaaaaaaaaaannaaaaanaaaaang

SEQ ID NO: 4004 - DNA, 537 bp, Homo sapiens
accctaaacagtggatttgagttccagcgtttattcttttttccttttttcagatcaccatctaagttacatctttagctcaggtccatccttctcaagatctccttcttagccccccagcccctggtgctgtctgtggtcaggtgaccttactcaggagcagatatctccttggccgccatggagcctcatccatccacacgtgcctgtagcattccagagctcactgcccttctagatgtgccttcccgcttggcttccagcggcttgtgctcactctgtctgccaggtatgagaagaacacgtaagaccgccaccacactcaccctccctcaaggccctgtgccataggggtggccacccgacctgcccccagaacttttggatactggaggcagttgcataggtctccctctctgggcaccaggactcagtccagcccaagactactctgggcagctcccatcccagtctggggccatttgcagactcaggaaaggatttctacagtgttctataaaagccaaaagagagagt

SEQ ID NO: 4005 - DNA, 239 bp, Homo sapiens
acttggccttgcagaaggtgatcttgcagtggcaggagctgtcctgtgtgtttcggatgagcacctccccatagtgctcgatccagcgctgaccactcaggacattgtgaatgcaggatgtcaccttgttccactcaaagtggtccccaaacctgggcaggctgacgttgactgttcccacaggcacaatctccagggatttgccccagaacttgttcttccacttcatatcttgccag

SEQ ID NO: 4006 - DNA, 255 bp, Homo sapiens
  misc_feature 189, 210, 229, 248, 249: n = A,T,C or G
acaaaacacaaccgaggagcgtatacagttgaaaacatttttgttttgattggaaggcagattattttatattagtattaaaaatcaaaccctatgtttctttcagatgaatcttccaaagtggattatattaagcaggtattagatttaggaaaacctttccatttcttaaagtattatcaagtgtcnagatcagcaagtgtccttaantcaaacaggttttttttgntgttgtttttgctttgttnncttttt

SEQ ID NO: 4007 - DNA, 426 bp, Homo sapiens
accaatgggtgcgctgcaatccagacagtaattctgcaaactgccttgaagaaaaaggaccaatgttcgaactacttccaggtgaatccaacaagatcccccgtctgaggactgacctttttccaaagacgagaatccaggacttgaatcgtatcttcccactttctgaggactactctggatcaggcttcggctccggctccggctctggatcaggatctgggagtggcttcctaacggaaatggaacaggattaccaactagtagacgaaagtgatgctttccatgacaaccttaggtctcttgacaggaatctgccctcagacagccaggacttgggtcaacatggattagaagaggattttatgttataaaagaggattttcccaccttgacaccaggcaatgtagttagcatattttatgt

SEQ ID NO: 4008 - DNA, 254 bp, Homo sapiens
  misc_feature 212: n = A,T,C or G
actcgcccaacaccacctgataggtccaggagctcgagatgcagtggccggcagtcacaacccagtcgggggcgatgaggctaccgccacacgtgtggtagaagcttccacttttctcatactgcagggaaacctgccagggccagctgtaggggaccgcatcctcaccattgacaacgcggctggaagggcgagaggaaggtgggccatancctgaggcaacggccacaaggaggagggaactgagcagccgg

SEQ ID NO: 4009 - DNA, 159 bp, Homo sapiens
tttttttttttttttttttttttacatagttgtcactttattatattattttccttctgtgacctttccaagtctgaaacagtcccagggacttcttttggttagttatttgcaatcaccgaattgatccagtcgatgtaattggagacccgcgtgaag

SEQ ID NO: 4010 - DNA, 511 bp, Homo sapiens
ctgcaacggagagactcaagatgattccctttttacccatgttttctctactattgctgcttattgttaaccctataaacaccaacaatcattatgacaagatcttggctcatagtcgtatcaggggtcgggaccaaggcccaaatgtctgtgcccttcaacagattttgggcaccaaaaagaaatacttcagcacttgtaagaactggtataaaaagtccatctgtggacagaaaacgactgtgttatatgaatgttgccctggttatatgagaatggagggaatgaaaggctgcccagcagttttgcccattgaccatgtttatggcactctgggcatcgtgggagccaccacaacgcagcgctattctgacgcctcaaaactgagggaggagatcgagggaaagggatccttcacttactttgcaccgagtaatgaggcttgggacaacttggattctgatatccgtagaggtttggagagcaacgtgaatgttgaattactgaatgc

SEQ ID NO: 4011 - DNA, 213 bp, Homo sapiens; identical to SEQ ID NO: 3345

SEQ ID NO: 4012 - DNA, 263 bp, Homo sapiens
  misc_feature 218: n = A,T,C or G
actcattccaatgaatttgactcagatgtggatgttggggacttgcagatggttaaatttatttggtataacaatgtgatcaacccaactttacctagagtgggagcatccaagattatagtggagacaaatgttggaaaacagttcaacttctgtagtccagaaaccgtcagggaggaagttctgctcaccctcacaccgtgttaggagactactgntatttgaccaatgaattgacttctaataaaatctagtggtgatgc

SEQ ID NO: 4013 - DNA, 91 bp, Homo sapiens
acttgtgggtttattacctatgggtttatatcctcaaatacgacattctagtcaaagtcttggtaatataaccaatgttttcaaatgtatt

SEQ ID NO: 4014 - DNA, 530 bp, Homo sapiens
accatagtatttggagcttctataggagtggagaggggcagctcattgttgagagttgcatgctgcaacctaatggtcagcaatgaaataaatacttgtagaatgttcacttcagtgtgaagttttgttatctagttaatttatatacatatatcctttgtagatacatttctatctaatcttgttgggctaattaagaaataaggggtggggtaattgtcaacaaagggagaagaaagtggtttaagatcagggcagcagaaaaattagagaacaagaatatcataatatggctcctggttttctttataagaggcagtgggaagatctgactagatgaaatgtatcatcaaccaaactggcatctaaaatagaatgggataaatactgtatggggttattggaggcatattaagaaaggacacctaatttattttgggaagaagtatgttaagagaagactttctagagaaggagaatggggcattctaggaagagtcaatggcatgtgcaaaggcatgaataaagac

SEQ ID NO: 4015 - DNA, 178 bp, Homo sapiens
acactcaaactttatttggttgcctggatggggccagagaggaggacaagaagggtgtcaaagggtcagctcagtaggggtgattcagggtgtgctccatgatggtcagaagcgccagccacgtctccttggctgtggggatgatctgggaggctggcagcaggaagccatagcgccc

SEQ ID NO: 4016 - DNA, 592 bp, Homo sapiens
  misc_feature 545, 589: n = A,T,C or G
acagagaatgagtttatctgtgaatgcctgaaacacacaggaaattcagctttaagcttatctcgaagaacctatggagaaccttgatatcctttacattatatgatttatagagaggttgcttttatcataatatagtaaaaactgatgcttgaggtgccagacatcagaccctctggaacctgataatcaggaggtagaagatgcagcagactgatccggtgggggtcatggaggccaatccagacattgctgtcatcagtgctactctccttaatcagtgaggccacgaaggcaccctccgcctgggtgagcacagacaccaggttgcctgaattcatgttctggcaatagagatctgcatcaacccaggtctcagggtcttcattaaagtagtagcagtaggagcgataggcattggtgccttctgggcagctgattcggggattaggcagctctgtctgggactcctggccttggctcagagacaggaacatcagggaggagatcagcatgaagaacgagttggtctgagccatgcttancggcagtgaatctcttgcttaaggagcaaatcagcaatctctgntgg

SEQ ID NO: 4017 - DNA, 323 bp, Homo sapiens
accaaaataagaagaaatttgcaaattaagaaattatcaatgttgctcagaaacatgccttacttttactctgaaattcactttaactgcttgacatataatttaatacttaaaaataatatagctaagttgtttaatagtatttatagaatgctacttttctgggtagacatgtttcacaaaacagttttcaattaatgctgagcattcatttgataattgtaatcataatttgattcactgattaatggattaataatttattcagtaatttagatgccataagaaccactgaaaggaataatctgatagttgctcattgt

SEQ ID NO: 4018 - DNA, 536 bp, Homo sapiens
actatctggtttgagagtgcccttgaaaatttcatactgcttagagtttcctttatttccgaacaaagaaactagtatgtgtcctgtaaccttttttccagacagtgtgacagataccttatacctccaacgtgcaaaattactggcatcaccagtgtctagataaaatttctggcccacatcatttgttttcccaggatatctatcagcatagtgacccatctgtgggcagcctccacttggacaagggaaacacttgtttgcagtgaagacgttgtaagaggcacaggggaatccagcaaagccatcagggttgacgatgctatcagtgtaatatttgtagcttcttaagtgattacaggccgcaaagtctcgagtcccttcccagattccgtctatgtccacaatctgagagagaatgttctttttacatccaggcatttccactcctccatttggaaagaaatctaggtggcccacgacttggctcattccaaaccccaaattggggactatgggggcaccatccgtgtgaa

SEQ ID NO: 4019 - DNA, 331 bp, Homo sapiens; identical to SEQ ID NO: 3009

SEQ ID NO: 4020 - DNA, 161 bp, Homo sapiens
actgaaggacaaaaacttggatggcctcaaaaggttcttgaacaccactgtgattctccaaggacgaattacgtaaattatactttcatacaaaggagacgataaggcagtaaacatggagacacgggggacagcgtccacactcagagggcctgggccac

SEQ ID NO: 4021 - DNA, 432 bp, Homo sapiens
  misc_feature 215, 242, 271, 359, 362, 403, 426: n = A,T,C or G
acaagctttttttttttttttttttttttttttgcaggcctgtgtgtcactttcaggcccttcctcatttattcataatatgtgtagccacgaggtagcatttcctttggcatcctggagaaacatgtctcacttagggttggacctgttagttaatagttctgcagcttctggtatttgtagtctgcccgttgatttacaaaatgcctcactgngattgtcgctacagtcaccacattcanagctagaaccatgaaggaaaacagatgcncactgttgaaaggctggtttggagtttcttccgcatgtgtttcatgctgaaatcctgaattgccacttgcacttcgatcccttttcanacnaatgggtcctatgatggaatctgttttccatttatatgaanaaatgtctcgtttgcttctgganacacaa

SEQ ID NO: 4022 - DNA, 332 bp, Homo sapiens
acgagtggattgtcagatatgccttgatggaagagagtttgctgcggatgaaatcagccagggccttggtctccttttcagactctgcggcaggtccacagtaagtttcatcacaggggtttcgagaggctccaatttcacaccaaccagcatcaaaatttctgttggggtctgtgccaatgcagctagatccagtatgggtggagcgagtctttctccaaatcggctcttggtccaggtgtagatgtagccatcaatattgagcacaggcaggacataaaagtctaacttgttgagaagctctgtcacttggatctcacgtccataggtaa

SEQ ID NO: 4023 - DNA, 565 bp, Homo sapiens
actatctggtttgagagtgcccttgaaaatttcatactgcttagagtttcctttatttccgaacaaggaaactagtatgtgtcctgtaaccttttttccagacagtgtgacagataccttatacctccaacgtgcaaaattactggcatcaccagtgtctagataaaatttctggcccacatcatttgttttcccaggatatctatcagcatagtgacccatctgtgggcagcctccacttggacaagggaaacacttgtttgcagtgaagacgttgtaagaggcacaggggaatccagcaaagccatcagggttgacgatgctatcagtgtaatatttgtagcttcttaagtgattacaggccgcaaagtctcgagtcccttcccagattccgtctatgtccacaatctgagagagaatgttctttttacatccaggcatttccactcctccatttggaaagaaatctaggtggcccacgacttggctcattccaaaccccaaattggggactatgggggcaccatccgtgtgaattacatccacaaatttggcatcgctgggg

SEQ ID NO: 4024 - DNA, 503 bp, Homo sapiens
actcaagtcaattataaaatttatatcttttgccttttacttgaagaaatcatgctatagaaatggttaatgtgcttctaataaatggaagtattgtagctggaatgtgatacatgtaacagtttaagttcccattgaaggtataaaatgatgaattgttgtaagacttagacactgagtctcagtctggagctgatgaagatgttgagataacagccagctttatctcaacagggtttgtgacccacaagtttgggccacagagaaaattgaagcaatttgcatgttatgacaacctcagtgggaagtgaaaatcagctgactcaaaacaacaaacaacaaccaaccagacccaagtcacagttgcacctattcaaaactagcttaaagtgagctatttttaaacttcataaaaatattcatgattttattagtttgaatatttctacaagattcgggtgggcttttcctttaggtgaaaacagctatccactcctgtggcc

SEQ ID NO: 4025 - DNA, 529 bp, Homo sapiens
acttgcatttcaaagcttataagatataaatggagattttaaagtagaaataaatatgtattccatgtttttaaaagattactttctactttgtgtttcacagacattgaatatattaaattattccatattttcttttcagtgaaaaattttttaaatggaagactgttctaaaatcacttttttccctaatccaatttttagagtggctagtagtttcttcatttgaaattgtaagcatccggtcagtaagaatgcccatccagttttctatatttcatagtcaaagccttgaaagcatctacaaatctctttttttaggttttgtccatagcatcagttgatccttactaagtttttcatgggagacttccttcatcacatcttatgttgaaatcactttctgtagtcaaagtataccaaaaccaatttatctgaactaaattctaaagtatggttatacaaaccatatacatctggttaccaaacataaatgctgaacattccatattattatagttaatgtctt

SEQ ID NO: 4026 - DNA, 333 bp, Homo sapiens
accctagctacaccttcagtggtgatgttcagctagctcaggatgacattgatggcatccaagccatatatggacgttcccaaaatcctgtccagcccatcggcccacaaaccccaaaagcatgtgacagtaagctaacctttgatgctataactacgattcggggagaagtgatgttctttaaagacagattctacatgcgcacaaatcccttctacccggaagttgagctcaatttcatttctgttttctggccacaactgccaaatgggcttgaagctgcttacgaatttgccgacagagatgaagtccggtttttcaaagggaataagt

SEQ ID NO: 4027 - DNA, 538 bp, Homo sapiens
  misc_feature 461, 529: n = A,T,C or G
acagggaaaggtcctttcagaatgactgcaacagtgcagcaaggattcccattccccgcctaaaggacaatacctttttaatagaaataaatgagttagttagttagatttttattacagattgaattaaacagttacaaagacattctctgatacattcattcatagaggtcttaacgtataaatacatagtaaatatcctataaaatggtaggcaatctcatcgtgcattatctttttgtgctcagacttgacttcacattcagtctctacatacagcttgattagaatcataaaaacaatatgaagacgattgcataaagggatagtttgacaaagcatattcagatattgtaacatttatggtgggtaaaaatgtatcttttgaaacaatatattagactccatttttagctgaaatgaaatttactgattcaatctttttaagaatttgtggatgnttaaaggaaatgtatattagcatgaatgtgtaactattaaactcctccgcaaagctattcagctgttnctaaaaaat

SEQ ID NO: 4028 - DNA, 571 bp, Homo sapiens
acaatagagtattactacattttatggatttcagacaaagaaacctccgtttattatatcctgatggtgagtattgccagctctaaattattcatatttctaagaccaaggaaaatataggtaaatgaaaattttgaaataaagaacaatgccttaatttgtaaaatctatcattgctaccaccctgcccaggtctggccatttgccataaatgctggtaaataaatacaatgactgatagagttctgtctcctttctcttttgctacccaaccttggttagagcaaccaaatgtctaaaaggcatgtaacaggagaaaaaaataaaaacattagtcaccaattcgccgattataaaagggatgtagattcctttaaattattactgaccttttgaaagccttcacgtaagtatgcaacagataaaatgactcatttacccacaacaataatctattatcagtcttaagtaatgtgaattcactgtatttctttttatacaacataaaaacttctgctttccaaacttcttccttttcactaatttatcagccactttatttatacacaga

SEQ ID NO: 4029 - DNA, 483 bp, Homo sapiens
acaaattataacaactttgaagggaccacagaggaagaaaatgacaggagaaaaggacaaattggatgggatgagaaatgaaaacagaatcacatgacctagacgcagtccacgggggtcgcgggacagtcctcggctatggcttttcttttgaagagatgaaggtgacagtcattggcacatgctggcatcctgggctccagagactctccaagccagacttttctttggcaagagcgagacttactttccagggaaatttggaaaatccacgctggcggtgttttgttcctcctgggtggcttgtttgtggcttcctaagctggaactgcattctggtggtggtgggggtcggggacagcaccagagccccgcaggctcaccccaagggcccagcctgcatttcccatggtagaaggaaaaggcgctgcacccgggcaacttttcacagtgaagagatcgcctttcctggctgccctcggg

SEQ ID NO: 4030 - DNA, 224 bp, Homo sapiens; identical to SEQ ID NO: 3600

SEQ ID NO: 4031 - DNA, 432 bp, Homo sapiens
accagggggaccgggagggcctggggggccggctggtccaggatagcctgcgagtcctcctactgctactccagacttgacatcatatgaatcatactggggagaatagttctgaggaccagtagggcatgattcacagattccaggggggccaggagaaccaggggaccctggttgtcctggaataccagggtcaccatttctcccaggaataccaggagggcctggatctcccttggggccttgaggtccttgaccattaggagggcgagtaggagcagttggaggctgtgggcaaactgcacaacattctccaaatggaatttctgggttggggcagtctaattcttgatcgtcacatattatgtcatcgcagagaacggatcctgagtcacagacacatatttggcatggttctggcttccagacatc

SEQ ID NO: 4032 - DNA, 411 bp, Homo sapiens; identical to SEQ ID NO: 3041

SEQ ID NO: 4033 - DNA, 80 bp, Homo sapiens; identical to SEQ ID NO: 3121

SEQ ID NO: 4034 - DNA, 292 bp, Homo sapiens
actcattccaatgaatttgactcagatgtggatgttggggacttgcagatggttaaatttatttggtataacaatgtgatcaacccaactttacctagagtgggagcatccaagattatagtggagacaaatgttggaaaacagctcaacttctgtagtccagaaaccgtcagggaggaagttctgctcaccctcacaccgtgttaggagactactgttatttgaccaatgaattgacttctaataaaatctagtggtgatgcaaaaaaaaaaaaaaaaaaaaaaagcttgt

SEQ ID NO: 4035 - DNA, 541 bp, Homo sapiens
actgaagatcagcgatgcaaactcattagggaggagatggtctgaactgagttggagacatagtctagtttaatttttgacttcatagtaattgcaggaccagttctagacatccatttttcagcttcctctagtttttgaacttgcaaacaaaggagaacttcttctcacaagattcatccttccatttcttgaatcctgagcatgaagtcaggcttgcacagtagccagcattagcactgctcggggatccagtgtcccaggacttgtaggagaccagggacccactactccagtgccagcggcggttcttttttgggtcatggaggccaatccagacattgctgtcatcagtgctactctccttaatcagtgaggccacgaaggcaccctccgcctgggtgagcacagacaccaggttgcctgaattcatgttctggcaatagagatctgcatcaacccaggtctcagggtcttcattaaagtagtagcagtaggagcgataggcattggtgccttctgggcagctgattcggggatt

SEQ ID NO: 4036 - DNA, 525 bp, Homo sapiens
cggaactgccacgatgctgccactttggactctttcactgctgctgggagcagtagcaggaaaagaagtttgctacgaaagactcggctgcttcagtgatgactccccatggtcaggaattacggaaagacccctccatatattgccttggtctccaaaagatgtcaacacccgcttcctcctatatactaatgagaacccaaacaactttcaagaagttgccgcagattcatcaagcatcagtggctccaatttcaaaacaaatagaaaaactcgctttattattcatggattcatagacaagggagaagaaaactggctggccaatgtgtgcaagaatctgttcaaggtggaaagtgtgaactgtatctgtgtggactggaaaggtggctcccgaactggatacacacaagcctcgcagaacatcaggatcgtgggagcagaagtggcatattttgttgaatttcttcagtcggcgttcggttactcaccttccaacgtgcatgtcattggccacagcctggg

SEQ ID NO: 4037 - DNA, 331 bp, Homo sapiens
acgagtggattgtcagatatgccttgatggaagagagtttgttgcggatgaaatcagccagggccttggtctccttttcagactctgcggcaggtccacagtaagtttcatcacaggggtttcgagaggctccaatttcataccaaccagcatcaaaatttctgttggggtctgtgccaatgcagctagatccagtatgggtggagcgagtctttctccaaaatcggctcttggtccaggtgtagatgtagccatcaatattgagcacaggcaggacataaaagtctaacttgttgagaagctctgtcacttggatctcacgtccataggt

SEQ ID NO: 4038 - DNA, 80 bp, Homo sapiens; identical to SEQ ID NO: 3052

SEQ ID NO: 4039 - DNA, 406 bp, Homo sapiens
gggttggtgacgatctccaggaagatgtccaaggtgtcgagaatggcggtgaaagctgcatcctgcccgtagtcttgagtgatcttcttggcaaaccagaccccactggcctgggtgacccactcccgggaatggatgcccgtgtcgatccagatggctggacgcttactgccccccgtgctgaacttcagcacgtaaatgggacgcccttcataggtgttgccaatctggatcttgctgacaaggtgcgggttctccgccaccagcaggtccaggaagtcatagatctcctccagggtgtggtaggtggcgtagttaaaagtgtcggtggagcgcgcccgggaccggaaggcgaacatctgctcctgctcctcgtccagcagcgactgcacgtcctcgatcatgg

SEQ ID NO: 4040 - DNA, 207 bp, Homo sapiens
  misc_feature 53: n = A,T,C or G
acactcaaactttatttggttgcctggatggggccagagaggaggacaagaanggtgtcaaagggtcagctcagtaggggtgattcagggtgtgctccatgatggtcagaagcgccagccacgtctccttggctgtggggatgatctgggaggctggcagcaggaagccatagcgcccagtgtcccggagctcgaaggtgaaggagt

SEQ ID NO: 4041 - DNA, 230 bp, Homo sapiens; identical to SEQ ID NO: 3096

SEQ ID NO: 4042 - DNA, 557 bp, Homo sapiens
  misc_feature 465, 545, 546: n = A,T,C or G
actatctggtttgagagtgcccttgaaaatttcatactgcttagagtttcctttatttccgaacaaagaaactagtatgtgtcctgtaaccttttttccagacagtgtgacagataccttatacctccaacgtgcaaaattactggcatcaccagtgtctagataaaatttctggcccacatcatttgttttcccaggatatctatcagcatagtgacccatctgtgggcagcctccacttggacaagggaaacacttgtttgcagtgaagacgttgtaagaggcacaggggaatccagcaaagccatcagggttgacgatgctatcagtgtaatatttgtagcttcttaagtgattacaggccgcaaagtctcgagtcccttcccagattccgcctatgtccacaatctgagagagaatgttctttttacatccaggcatttccactcctccatttggaaaganatctaggtggcccacgacttggctcattccaaaccccaaattggggactatgggggcaccatccgtgtgaattacatccnnaatttggcatc

SEQ ID NO: 4043 - DNA, 293 bp, Homo sapiens
gttttcctatttcaggcagagtgcggtatattccaggaaacactgtttcctactcacttagcttacttctttgttgaatgcctcactaatggcaagtttcaagatgttttgggtgacaatgcacacatgctgggcaaaagggtgatggccagtggctggcagctgggccagcagaagctaggacatctgtgagttgtcattctcatctatccatgtccactggcctgccagcatccgccagtgccttgccagtgtgcacggtcccacactgtggcccctgagtcccctaatgt

SEQ ID NO: 4044 - DNA, 488 bp, Homo sapiens
  misc_feature 466, 483: n = A,T,C or G
accaatacgtatagagaaatactaattttggttacagtttcctccttactgttaaatatacaaactataatacctttcaaaataaaatacccacataagatagctttaataagaaatattcaagccagaacttggaaaaacattaagcaagaaatttactgggctgataatgtcttaatttgtgatcattcaaacatttgatgatgtgtctcctcttgtagaccccaggctctctcccttttggtccccacagttaagagacattcagttggttgtgcttgagacaacctgtgataatttcattcagaggaaaaatattttgcaatataatgacagaccaagaaggaagagaaggtgggtgctctggagaaaacttatatgagaaaaacacaaaattatcacttgaaaataaaaagattttttttccaaaggaatgctgcacccatttcacttaagattagaaatncaggttaaaggcactgngatgt

SEQ ID NO: 4045 - DNA, 584 bp, Homo sapiens
  misc_feature 413, 527, 552: n = A,T,C or G
acctgatgcactggccttatgcctttgagcggggagacaaccccttccccaagaatgctgatgggactatatgctacgactccacccactacaaggagacttggaaggctctggaggcactggtggctaaggggctggtgcaggcgctgggcctgtccaacttcaacagtcggcagattgatgacatactcagtgtggcctccgtgcgtccagctgtcttgcaggtggaatgccacccatacttggctcaaaatgagctaattgcccactgccaagcacgtggcctggaggtaactgcttatagccctttgggctcctctgatcgtgcatggcgtgatcctgatgagcctgtcctgctggaggaaccagtagtcctggcattggctgaaaagtatggccgatctccagctcanatcttgctcaggtggcaggtccagcggaaagtgatctgcatccccaaaagtatcactccttctcgaatccttcagaacatcaaggtgtttgacttcacctttagcccagaaganatgaagcagctaaatgccctgaacnaaaaattggagatatattgtgcctatgcttac

SEQ ID NO: 4046 - DNA, 270 bp, Homo sapiens; identical to SEQ ID NO: 3918

SEQ ID NO: 4047 - DNA, 477 bp, Homo sapiens
acctccagaggtaactgtgctcacgaacagccctgtggaactgagagagcccaacgtcctcatctgtttcatcgacaagttcaccccaccagtggtcaatgtcacgtggcttcgaaatggaaaacctgtcaccacaggagtgtcagagacagtcttcctgcccagggaagaccaccttttccgcaagttccactatctccccttcctgccctcaactgaggacgtttacgactgcagggtggagcactggggcttggatgagcctcttctcaagcactgggagtttgatgctccaagccctctcccagagactacagagaacgtggtgtgtgccctgggcctgactgtgggtctggtgggcatcattattgggaccatcttcatcatcaagggagtgcgcaaaagcaatgcagcagaacgcagggggcctctgtaaggcacatggaggtgatggtgtttcttagagagaagatcact

SEQ ID NO: 4048 - DNA, 372 bp, Homo sapiens
  misc_feature 335, 337: n = A,T,C or G
acattagcaccataacatgcgtctttaaagccttcccaaatattagtaatcttgaccagcaatgacaagaaaaaagaggagcacctttacaagcagttgatatccaatattaaaataattgtggctttaaaaatatttctttaaattcttgcattacacttttctttttaaaccaatcttccaggagattaatcaatgaaatttataagttttatcaacgtataaaatttttttcatcttctgggactcatagaatacaatctgtgtttctgaccagttgaggtagttaaaatagggagggcttttctaatttcgtatttgactatttcagaaananaggttatcttttactggtgagcacagtcattgctc

SEQ ID NO: 4049 - DNA, 402 bp, Homo sapiens; identical to SEQ ID NO: 3766

SEQ ID NO: 4050 - DNA, 151 bp, Homo sapiens
actgtgaggtttgatttgtgtgacagaatctggcttccagaagtcaatctgggtcgtgctggccaactcgcggattatgttaatgtgattttcatcttcaacgttaacacggaacaccttctcgccttcaaagtgctcactaccatgatga

SEQ ID NO: 4051 - DNA, 517 bp, Homo sapiens
  misc_feature 64, 71, 146, 215, 231, 278, 401, 407, 426, 429, 441, 450,452, 491, 493, 502: n = A,T,C or G
acaagctttttttttttttttttttttttttttgggagaacagggttattttattggtataganactgcanagtgaccaggggctttagctgttggcagctatggtgtccttaatccagtccacatagttgtagaccttggtgtanactccaggccttctcttctgggcacagccatagccccaggagacaattccttgaagctgtccattgcanaccacagggccaccanagtcaccctggcaggaatccttgcctccctcaaggaagcccacacanaacatcttgctggtaatctttaaagggtaggaggctttacacttagcctgggtcagcacaggagcatccaggcactgcagctcatctgggtagtcggcccctgagctcagggtattgccccanccgganataaggcactcggtgccancanctggaggggcantgggcaaananatggtggacacatgggcattgatgacggcaggtgtgganancttgatcancatgatgtcattgtt

SEQ ID NO: 4052 - DNA, 80 bp, Homo sapiens; identical to SEQ ID NO: 3052

SEQ ID NO: 4053 - DNA, 503 bp, Homo sapiens
ctgatgtccacagtttgcagcctcagctagactgtgggcccagggagatcaaggtgaaggtggacaaatgtttgctgggaggcctgggtttgggggaggaggtcattgcctacctgcgagacccaaactgcagcagcatcttgcagacagaggagaggaactgggtatctgtgaccagccccgtccaggctagtgcctgcaggaacattctggagagaaatcaaacccatgccatctacaaaaacaccctctccttggtcaatgatttcatcatcagagacaccatcctcaacatcaacttccaatgtgcctacccactggacatgaaagtcagcctccaagctgccttgcagcccattgtaagttccctgaacgtcagtgtggacgggaatggagagttcattgtcaggatggccctcttccaagaccagaactacacgaatccttacgaaggggatgcagttgaactgtctgttgagtccgtgctgtatgtgggtgccatc

SEQ ID NO: 4054 - DNA, 522 bp, Homo sapiens
cagggttggacccagcagaaccttgctttcagggcacacctgaattagtccgattggaccccagcgatgccaaatttgtggatgtaattcacacggatggtgcccccatagtccccaatttggggtttggaatgagccaagtcgtgggccacctagatttctttccaaatggaggagtggaaatgcctggatgtaaaaagaacattctctctcagattgtggacatagacggaatctgggaagggactcgagactttgcggcctgtaatcacttaaggagctacaaatattacactgatagcatcgtcaaccctgatggctttgctggattcccctgtgcctcttacaacgtcttcactgcaaacaagtgtttcccttgtccaagtggaggctgcccacagatgggtcactatgctgatagatatcctgggaaaacaaatgatgtgggccagaaattttatctagacactggtgatgccagtaattttgcacgttggaggtataaggtatctgtcacactgt

SEQ ID NO: 4055 - DNA, 532 bp, Homo sapiens
ggaccattggacgcatcacagggttggacccagcagaaccttgctttcagggcacacctgaattagtccgattggaccccagcgatgccaaatttgtggatgtaattcacacggatggtgcccccatagtccccaatttggggtttggaatgagccaagtcgtgggccacctagatttctttccaaatggaggagtggaaatgcctggatgtaaaaagaacattctctctcagattgtggacatagacggaatctgggaagggactcgagactttgcggcctgtaatcacttaagaagctacaaatattacactgatagcatcgtcaaccctgatggctttgctggattcccctgtgcctcttacaacgtcttcactgcaaacaagtgtttcccttgtccaagtggaggctgcccacagatgggtcactatgctgatagatatcctgggaaaacaaatgatgtgggccagaaattttatctagacactggtgatgccagtaattttgcacgttggaggtataaggtatctgt

SEQ ID NO: 4056 - DNA, 238 bp, Homo sapiens
actcacccaacaccacctggtaggtcagatccctcgagatgcagtggccggcagtcacaacccaatcgggggcgatgaggctaccgccacacgtgtggtagaagcttccacttttctcatactgcagggaaacctgccagggccagctgtaggggaccgcatcctcaccatggacaacgcggctggaagagtgagaggaaggtgggccatagcctgaggcaacggccacaaggaggag

SEQ ID NO: 4057 - DNA, 517 bp, Homo sapiens
  misc_feature 471: n = A,T,C or G
accggccatcgacctagcccgggttctagatttggggcccatcactcggagaggtgcacagtctcccggtgtcatgaatggaacccctagcactgcagggttcctggtggcctggcctatggtcctcctgactgtcctcctggcttggctgttctgagagctccgctgagcatctggccttgaagtttgtgttcttccctctggcaatggctcccttcagcacttctgctttccactccaattcacacaggcttggtattaacagaatcaaggccaggctaggttaggaaaagggaagagctttcaccttctttaaaactctcggctgggcgcagtggctcatgcctgtaatcccagcattttgggaggctgaggcaggtggatcacctgaggtcagcagttcaaaatcagcctggccaaaatgctgaaactccgtctctactaaaaatacaaaaattagccaggcatggntggcaggcgcctgtaatcccagctactcgggaggccaaggcaggag

SEQ ID NO: 4058 - DNA, 394 bp, Homo sapiens
acaggagaaatctccaccgtcaccgcacaatccaccaggcgcattaccacctgaagtgaaggtctcatctcgaaggtgcgctcagccataaaaagaaaacatattacagaaaggaaaaataagtgtgctcttcccacccgcaaagcggtctcaccttcagttctagctttctttactccaaagtcttctgagtcttccaagcatctctttcgatttgttcccacactaatatgattaggaaatacattctgatgacccccatttaagatgccattgttatagaaatggttcagatgacaattctggaggttcaagagaaactgggcacactcttggaaaccctgggtttgtgcaatgtctgctgctgtcaggccactggcatttctcaggctgt

SEQ ID NO: 4059 - DNA, 533 bp, Homo sapiens
  misc_feature 225, 427, 428, 447, 487, 488: n = A,T,C or G
ggacgcatcacagggttggacccagcagaaccttgctttcagggcacacctgaattagtccgattggaccccagcgatgccaaatttgtggatgtaattcacacggatggtgcccccatagtccccaatttggggtttggaatgagccaagtcgtgggccacctagatttctttccaaatggaggagtggaaatgcctggatgtaaaaagaacattctctctcanattgtggacatagacggaatctgggaagggactcgagactttgcggcctgtaatcacttaagaagctacaaatattacactgatagcatcgtcaaccctgatggctttgctggattcccctgtgcctcttacaacgtcttcactgcaaacaagtgtttcccttgtccaagtggaggctgcccacagatgggtcactatgctnntagatatcctgggaaaacnaatgatgtgggtcagaaattttatctagacactggtgatnncagtaattttgcacgttggaggtataaggtatctgtcacactgtc

SEQ ID NO: 4060 - DNA, 411 bp, Homo sapiens; identical to SEQ ID NO: 3218

SEQ ID NO: 4061 - DNA, 295 bp, Homo sapiens
  misc_feature 101: n = A,T,C or G
accttccttaagccaggaaagggattcatggcgtcggaaatgatctggctgaatccgtggtggcaccgagaccaaactcattcaccaaatgatgccacttnccagaggcagagcctgagtcaccggtcacccttaatatttattaagtgcctgagacacccggttaccttggccgtgaggacacgtggcctgcacccaggtgtggctgtcaggacaccagcctggtgcccgtcctcccgacccctacccacttccattcccgtggtctccttgcactttctcagttcagagttgt

SEQ ID NO: 4062 - DNA, 151 bp, Homo sapiens
cggaactgccacgatgctgccactttggactctttcactgctgctgggagcagtagcaggaaaagaagtttgctacgaaagactcggctgcttcagtgatgactccccatggtcaggaattacggaaagacccctccatatattgccttgg

SEQ ID NO: 4063 - DNA, 230 bp, Homo sapiens; identical to SEQ ID NO: 3096

SEQ ID NO: 4064 - DNA, 582 bp, Homo sapiens
  misc_feature 515, 575: n = A,T,C or G
accaacatttattaatcctcacaacacccctgtgaggtaggtcagtatgtcctttagagtcgagaactgaggcagaggtcaagcaaacctgccctgggccacagagcagcagatgaagggcctagacctggatccagaagctagggctctcggtccagcattcatccactggtggacatcacatgggcttatttttaccagcgaaggttacgtgaaggacaaaacgcactcagccagcaacggaaactcaacagttcaaacagcactggggaacatgtcagttaaagagacgaaacgctgaccagctcatgaatgaggcaagacaacatgcggctgaggaagtgtggaatcatcacgactggggattagaccaagaacgggcgctcaggagggttcaggaaaatgtaaacaaactaggaacccatccaaggggtgacaggcccaaatgcctacggtctccaaatggtagaaaaattagaaaaagatagtggaaaaatccaaccacgcaaccttanctttaaactaggaatgacaattaatgtgtctaatgttcattcacactagaaaggccgatnatgtttg

SEQ ID NO: 4065 - DNA, 296 bp, Homo sapiens
acttgatgccctggctgtaggtccagtcaatagtgcttccactggcttgataaattgccttgatgatgctgccatagttgaacttggtcccgtagagagaggccagggctgtcacagcagccttggaaagctgatccagctcatcctggtcagggactggttctgttttgtagccatagggatacatgaggagctgggagtagctgtggatggagacgaaggccttgatgttcccatggtccttcacaaagtctacaatggacttgacctccacttcggaattggcaaacttgccg

SEQ ID NO: 4066 - DNA, 533 bp, Homo sapiens
  misc_feature 37, 113, 115, 121, 159, 251, 265, 298, 306, 316, 326, 331,358, 385, 398, 436, 443, 463, 479, 483: n = A,T,C or G
cttttttttttttttttttttttttttcgggagacanagtcttgctctgttgcccaggctggagtgcaatggcacaatctcaactcacttgcaacctccaccccctgagttcnancaattntcctgccttggcctcccgagtagttgggattacaggcncctgccaccatgcctggctaatttttgtatttttagtaaagacggagtttcagcattttggccaggctgattttgaactgctgacctcaggngatccacctgcctnagcctcccaaaatgctgggattacaggcatganccactgcncccagccganagttttaaanaaggngaaagctcttcccttttcctaacctancctggccttgattctgttaataccaancctgtgtgaattngagtggaaagcaaaagtgctgaagggagccattgccanagggaanaacacaaacttcaaggccanatgctcagcggagctntcanaacagccaagccaggaggacagtcaggaggaccataggccaggccaccag

SEQ ID NO: 4067 - DNA, 540 bp, Homo sapiens
acattaagactaaagttatggatcgttcctgtttggcatagaaatgtgatgactattaacagaaaggggaaaaagatttgccccctatccatcatcagacagacagacttctcttactaaaccccttatgtggagtgggatgagtgactatttcctgcagaaagatcatgcaacttaaagcaaaaaaaccaaccaacaaaaaaaacaaaaacaaaaacaaacttgtgcatattacacatgactgattattgggtgtgcctggcaagactaaatgctgattcgttttcagcgtttgaattaaaagaattccatatacagcagatagataacagtaacaaatattgaactaaaatcgctggcaacattatatattaaggttccatcataaactcctcattattctctatgtattctgttacagcttctagcatgcttcatcgtgacaacctaatattatcaagcctcatattttcacaggattatatacttattagatgtttgtttctagaaattatactacatatgtgttactaggcatat

SEQ ID NO: 4068 - DNA, 165 bp, Homo sapiens
acagaagaaagcgggtgtcaatgtcctcgggggaccagggaagtaattttacaggtcgctgaagggttcctgcccatggtttttcatcagaaaagcagccaagttgtccgtagcagacctcttttcctctgactgtggccagcaggagaaggccgagggtccaag

SEQ ID NO: 4069 - DNA, 529 bp, Homo sapiens
  misc_feature 56, 157, 335, 482: n = A,T,C or G
gtacaagctttttttttttttttttttttttttttgggttgaggattttttattgngttttccacatagataaaaaaataaggctttttgatgaaaagaatccattacaaagtcaaaaatccattacaattataattgaatcagtaacaaaatttanctttaaatgagtcaagtattctgcatttgaaatttaatatcacaaacattcaagattagtgaattttggtaagaaaaaaatactagaagaaaggaaaaggacaccttttcaacagatagtaatttataaaaatttttttaaaagtgctttgggaaaacacacagtatcattacttaanaaaagtcatttaaggaagacttaagtgcttcaagtggagtgtattacagactaaaaaatgttttaaaatttgccaagaaatttaagtgttaaaaatactcttctccttatccagtttcatgtttaaggaaacatttgacagacaagnaaaccaaacgcaaaaaaaagttcacctgcattttaactaataaattc

SEQ ID NO: 4070 - DNA, 331 bp, Homo sapiens; identical to SEQ ID NO: 3099

SEQ ID NO: 4071 - DNA, 195 bp, Homo sapiens
caagattatagtggagacaaatgttggaaaacagttcaacttctgtagtccagaaaccgtcagggaggaagttctgctcaccctcacaccgtgttaggagactactgttatttgaccaatgaattgacttctaataaaatctagtggtgatgcaaaaaaaacaaaaaaaaaaaaaaaaaaaaaaaaaaagcttgt

SEQ ID NO: 4072 - DNA, 603 bp, Homo sapiens
catactttttgggctcaactcagggttaccaaaatagagtcaaactcaactcaggattacctaaatggagtcaaattttgtgtgtggttttgtaacatgattctttcagtcatcatttccaggccacatttttcatgtcactcatgactgcattataagtttgtaccatatcatgcaaagtctatgaaatactaaataaggtaaaacagttaatcatttaaagcacgatgagcaaattctcttatcatacggctattctcatcaccggacgaaggttggttttgcattattcctaaaataaaacagttcgtgagtgaatactgcaaattaaaaactgtcaaaacacagcaaatgataaggactaaacatccattatccacaaactcatttgaaactactaccatggatttgagagggaaaccaaaagtttgcaaacctctctgggagctgtgtcaaagttagtattctgaagccctagcaatacaaagtccccaaataagtaaaatacagataaaagtggaagagcctacatcagctcaaagtaacatacttcctttaacttatgccttcagtttaataatactgtttataccactacattgt

SEQ ID NO: 4073 - DNA, 194 bp, Homo sapiens
tgttggcactcttggttctggtgactgtggccctggcatctgctcatcatggtggtgagcactttgaaggcgagaaggtgttccgtgttaacgttgaagatgaaaatcacattaacataatccgcgagttggccagcacgacccagattgacttctggaagccagattctgtcacacaaatcaaacctcacagt

SEQ ID NO: 4074 - DNA, 257 bp, Homo sapiens
gctccggctgctcagttccctcctccttgtggccgttgcctcaggctatggcccaccttcctctcactcttccagccgcgtcgtccatggtgaggatgcggtcccctacagctggccctggcaggtttccctgcagtatgagaaaagtggaagcttctaccacacgtgtggcggtagcctcatcgcccccgattgggttgtgactgccggccactgcatctcgagggatctgacctaccaggtggtgttgggtgagt

SEQ ID NO: 4075 - DNA, 185 bp, Homo sapiens
  misc_feature 40, 41, 163, 185: n = A,T,C or G
acttgtgaggtttgatttgtgtgacagaatctggcttccnnaagtcaatctgggtcgtgctggccaactcgcggattatgttaatgtgattttcatcttcaacgttaacacggaacaccttctcgccttcaaagtgctcaccaccatgatgagcagatgccanggccacagtcaccagaaccaan

SEQ ID NO: 4076 - DNA, 175 bp, Homo sapiens
ggctacaaaacagaaccagtccctgaccaggatgagctggatcagctttccaaggctgctgtgacagccctggcctctctctacgggaccaagttcaactatggcagcatcatcaaggcaatttatcaagccagtggaagcactattgactggacctacagccagggcatcaagt

SEQ ID NO: 4077 - DNA, 512 bp, Homo sapiens
ccagcagaaccttgctttcagggcacacctgaattagtccgattggaccccagcgatgccaaatttgtggatgtaattcacacggatggtgcccccatagtccccaatttggggtttggaatgagccaagtcgtgggccacctagatttctttccaaatggaggagtggaaatgcctggatgtaaaaagaacattctctctcagattgtggacatagacggaatctgggaagggactcgagactttgcggcctgtaatcacttaagaagctacaaatattacactgatagcatcgtcaaccctgatggctttgctggattcccctgtgcctcttacaacgtcttcactgcaaacaagtgtttcccttgtccaagtggaggctgcccacagatgggtcactatgctgatagatatcctgggaaaacaaatgatgtgggccagaaattttatctagacactggtgatgccagtaattttgcacgttggaggtataaggtatctgtcacactgtc

SEQ ID NO: 4078 - DNA, 331 bp, Homo sapiens
acccatggacgtgagatccaagtggcagagcttctcgacaagttagacttttatgtcctgcctgtgctcaatattgatggctacatctacacctggaccaagagccgattttggagaaagactcgctccacccatactggatctagctgcattggcacagaccccaacagaaattttgatgctggttggtgtgaaattggagcctctcgaaacccctgtgatgaaacttactgtggacctgccgcagagtctgaaaaggagaccaaggccctggctgatttcatccgcaacaaactctcttccatcaaggcatatctgacaatccactcgt

SEQ ID NO: 4079 - DNA, 354 bp, Homo sapiens
cagagctgaaggaagaaatagaagtaaaaaagaaacaactccaaaacctagaagatgctttgtgatgacatcatgcttgcagatgatgattgcttaatgataccttatcaaattggtgatgtcttcattagccattctcaagaagaaacgcaagaaatgttagaagaagcaaagaaaaatttgcaagaagaaattgacgccttagaatccagagtggaatcaattcagcgagtgttagcagatttgaaagttcagttgtatgcaaaattcgggagcaacataaaccttgaagctgatgaaagttaaacattttataatactttttttatttgtttaataaacttgaatattgta

SEQ ID NO: 4080 - DNA, 533 bp, Homo sapiens
  misc_feature 395: n = A,T,C or G
ccgggagcagctgctgcagcgggcgcggctggccgagcaggcggagcgctgcgacgacatggcctccgctatgaaggcggtgacagagctgaatgaacctctctccaatgaagatcgaaatctcctctctgtggcctacaagaatgtggttggtgccaggcgatcttcctggagggtcattagcagcattgagcagaaaaccatggctgatggaaacgaaaagaaattggagaaagttaaagcttaccgggagaagattgagaaggagctggagacagtttgcaatgatgtcctgtctctgcttgacaagttcctgatcaagaactgcaatgatttccagtatgagagcaaggtgttttacctgaaaatgaagggtgattactaccgctacttancaaaggtcgcttctggggagaagaaaaacagtgtggtcgaagcgtctgaagctgcctacaaggaagcctttgaaatcagcaaagagcagatgcaacccacgcatcccatccggctgggcctggccctcacttctccgt

SEQ ID NO: 4081 - DNA, 263 bp, Homo sapiens
  misc_feature 39, 60, 75, 91: n = A,T,C or G
acaagcttttttttttttttttttttttttttttaaagnttaaacaccttttatttgaanaaatattgcttctanactttcctgaagccanaattgttctataaaagtatcatggaatattatacatgattaaaaaacagagtatgcttcctaataacttgaaatctttttacaaagcacattattcatgatcataaatatgtttgttctgtcatcccaccgatgatacacgcatcaggcaagcagctaatttgaacatatgt

SEQ ID NO: 4082 - DNA, 578 bp, Homo sapiens
actgattttaaaaactaataacttaaaactgccacacgcaaaaaagaaaaccaaagtggtccacaaaacattctcctttccttctgaaggttttacgatgcattgttatcattaaccagtcttttactactaaacttaaatggccaattgaaacaaacagttctgagaccgttcttccaccactgattaagagtggggtggcaggtattagggataatattcatttagccttctgagctttctgggcagacttggtgaccttgccagctccagcagccttcttgtccactgctttgatgacacccaccgcaactgtctgtctcatatcacgaacagcaaagcgacccaaaggtggatagtctgagaagctctcaacacacatgggcttgccaggaaccatatcaacaatggcagcatcaccagacttcaagaatttagggccatcttccagctttttaccagaacggcgatcaatcttttccttcagctcagcaaacttgcatgcaatgtgagccgtgtggcaatccaatacaggggcatagccggcgcttatttggcctggatgggtcaggataatc

SEQ ID NO: 4083 - DNA, 552 bp, Homo sapiens
  misc_feature 397, 399: n = A,T,C or G
actgctgtagaaaagtattaatagcttcatttcatataaacataagtaactcccaaacacttatgtagaggactaaaaatgtatctggtatttaagtaatctgaaccagttctgcaagtgactgtgttttgtattactgtgaaaataagaaaatgtagttaattacaatttaaagagtattccacataacttcttaatttctacattccctcccttactcttcgggggtttcctttcagtaagcaacttttccatgctcttaatgtattcctttttagtaggaatccggaagtattagattgaatggaaaagcacttgccatctctgtccaggggtcacaaattgaaatggctcctgtatcacatacggaggtcttgtgtatctgtggcaacagggngnttccttattcactctttatttgctgctgtttaagttgccaacctcccctcccaataaaaattcacttacacctcctgcctttgtagttctggtattcactttactatgtgatagaagtagcatgttgctgccagaatacaagcattgcttttg

SEQ ID NO: 4084 - DNA, 331 bp, Homo sapiens; identical to SEQ ID NO: 3099

SEQ ID NO: 4085 - DNA, 455 bp, Homo sapiens
acaacagattttgctttttatttatttataatgtaattttatagaataattctgggatttgagaggatctaaaactatttttctgtataaatattatttgccaaaagtttgtttatattcagaagtctgactatgatgaataaatcttaaatgctttgtttaattaaaaaacaaaaatcaccaatatccaagacatgaagatatcagttcaacaaatactgtagttaagagactaactctccacttgtatgggaactacatttcactcttggttttcgggatataacagcacttcaccgaaatattctttcagccataccactggtaacatttctactaaatctttctgtaacacttaaagaattccctcattcattaccttacagtgtaaacaggagtctaatttgtatcaatactatgttttggttgtaatattcagttcactcacccaatgt

SEQ ID NO: 4086 - DNA, 283 bp, Homo sapiens
  misc_feature 114, 222, 281: n = A,T,C or G
acaagcttttttttttttttttttttttttggtttgcaggaggcctttaattgtgaagagcgcaatcagaaaacagatatgctggtcaaggaggtggccagcccgggagatgcnctggagcaggggagagatgcccctgcgcctagtggcctacagcattctgggctaggtgtgggagtgggtgggcagtctcactgcttggagcgtccagcgtcatggcanatgccaaagttggtgttggtgatggagcccacgatggtcttgtctccctcacaggtcanaa

SEQ ID NO: 4087 - DNA, 466 bp, Homo sapiens
ggcatattttgttgaatttcttcagtcggcgttcggttactcaccttccaacgtgcatgtcattggccgcagcctgggtgcccacgctgctggggaggctggaaggagaaccaatgggaccattggacgcatcacagggttggacccagcagaaccttgctttcagggcacacctgaattagtccgattggaccccagcgatgccaaatttgtggatgtaattcacacggatggtgcccccatagtccccaatttggggtttggaatgagccaagtcgtgggccacctagatttctttccaaatggaggagtggaaatgcctggatgtaaaaagaacattctctctcagattgtggacatagacggaatctgggaagggactcgagactttgcggcctgtaatcacttaagaagctacaaatattacactgatagcatcgtcaaccctgatggctttgctggattc

SEQ ID NO: 4088 - DNA, 331 bp, Homo sapiens
acgagtggattgtcagatatgccttgatggaagagagtttgttgcggatgaaatcagccagggccttggtctccttttcagactctgcggcaggtccacagtaagtttcatcacaggggtttcgagaggctccaatttcacaccaaccagcatcaaaatttctgttggggtctgtgccaatgcagctagatccagtatgggtggagcgagtctttctccaaaatcgactcttggtccaggtgtagatgtagccatcaatattgagcacaggcaggacataaaagtctaacttgttgagaagctctgtcacttggatctcacgtccataggt

SEQ ID NO: 4089 - DNA, 207 bp, Homo sapiens; identical to SEQ ID NO: 2996

SEQ ID NO: 4090 - DNA, 457 bp, Homo sapiens
  misc_feature 454: n = A,T,C or G
atgaatccatgaataataaagcgagaagaaaactggctggccaatgtgtgcaagaatctgttcaaggtggaaagtgtgaactgtatctgtgtggactggaaaggtggctcccgaactggatacacacaagcctcgcagaacatcaggatcgtgggagcagaagtggcatattttgttgaatttcttcagtcggcgttcggttactcaccttccaacgtgcatgtcattggccacagcctgggtgcctacgctgctggggaggctggaaggagaaccaatgggaccattggacgcatcacagggttggacccagcagaaccttgctttcagggcacacctgaattagtccgattggaccccagcgatgccaaatttgtggatgtaattcacacggatggtgcccccatagtccccaatttggggtttggaatgagccaagtcgtgggccacctanatt

SEQ ID NO: 4091 - DNA, 551 bp, Homo sapiens; identical to SEQ ID NO: 3482

SEQ ID NO: 4092 - DNA, 207 bp, Homo sapiens; identical to SEQ ID NO: 2996

SEQ ID NO: 4093 - DNA, 240 bp, Homo sapiens
acaacaagtgggaaacgatagaggcttggactcaacaagtcgccactgagaatccagccctcatctctcgcagtgttatcggaaccacatttgagggacgcgctatttacctcctgaaggttggcaaagctggacaaaataagcctgccattttcatggactgtggtttccatgccagagagtggatttctcctgcattctgccagtggtttgtaagagaggctgtccgtacctcggccg

SEQ ID NO: 4094 - DNA, 524 bp, Homo sapiens
ggaactgccacgatgctgccactttggactctttcactgctgctgggagcagtagcaggaaaagaagtttgctacgaaagactcggctgcttcagtgatgactccccatggtcaggaattacggaaagacccctccatatattgccttggtctccaaaagatgtcaacacccgcttcctcctatatactaatgagaacccaaacaactttcaagaagttgccgcagattcatcaagcatcagtggctccaatttcaaaacaaatagaaaaactcgctttattattcatggattcatagacaagggagaagaaaactggctggccaatgtgtgcaagaatctgttcaaggtggaaagtgtgaactgtatctgtgtggactggaaaggtggctcccgaactggatacacacaagcctcgcagaacatcaggatcgtgggagcagaagtggcatattttgttgaatttcttcagtcggcggttcggttactcaccttccacgtgcatgtcattggccacagcctggg

SEQ ID NO: 4095 - DNA, 487 bp, Homo sapiens
caggtactctggtaagcttgttgttgtccaagtgaagctccctcagatgaggcgtgttggccagagagccattgtcaacagcagagatgctgttgaaactcaatcccaacttagccaaattattcagtcctttcaggctagctgcatcaactctgctgattttgttgccatcaagatgtaattccgtaagggaaggaggaagaccttgaggaatgctggtgatattggtatcagcaatgcggatgtaggagagcttcttcattccctggaaagccccattttcaattcctgagctcttcagcggattggtgcccagttctatgacaatcatctggttcagtccattgaaagtaacttttcgcactttggtgatctcattctcatgggcacgcagctcctgaagagttttgggcattttttctggcaattccttcagctgattcttggacagataaagtcgttccaacttcaccaaaggtgtaaatgc

SEQ ID NO: 4096 - DNA, 190 bp, Homo sapiens
acactcaaactttatttggttgcctggatggggtcagagaggaggacaagaagggtgtcaaagggtcagctcagtaggggtgattcagggtgtgctccatgatggtcagaagcgccagccacgtctccttggctgtggggatgatctgggaggctggcagcaggaagccatagcgcccagacctcggccg

SEQ ID NO: 4097 - DNA, 495 bp, Homo sapiens
  misc_feature 250: n = A,T,C or G
acttcactgcggacttgacttcttgagcaagaaggctggcactgttcattaagagaatcacagagatgaatctcacaatgcaggaaaactaggtcataatgtccagcaaacatgaacatctgaactgagaaccggctttccgaggactgcccattctcctccacgtggatggtggaatcacgctgatttgagcagctgtttctgatgatgaaatacttcacaaggtcagccttgtcttcagtgggggtgnatagcagttcctcaacaccaggttaacccgggaggtgtccccttgttccaagatggcacccacatacagcacggactcaacagacagttcaactgcatccccttcgtaaggattcgtgtagttctggtcttggaagagggccatcctgacaatgaactctccattcccgtccacactgacgttcagggaacttacaatgggctgcaaggcagcttggaggctgactttcatgtccagtgggtagg

SEQ ID NO: 4098 - DNA, 296 bp, Homo sapiens
actcattccaatgaatttgactcagatgtggatgttggggacttgcagatggttaaatttatttggtataacaatgtgatcaacccaactttacctagagtgggagcatccaagattatagtggagacaaatgttggaaaacagttcaacttctgtagtccagaaaccgtcagggaggaagttctgctcaccctcacaccgtgttaggagactactgttatttgaccaatgaattgacttctaataaaatctagtggtgatccaaaaaaaaaaaaaaaaaaaaaaaaaaagcttgt

SEQ ID NO: 4099 - DNA, 474 bp, Homo sapiens
gtggacaaggcacttaccaacagagattgctgatttgctccttaagcaagagattcactgccgctaagcatggctcagaccaactcgttcttcatgctgatctcctccctgatgttcctgtctctgagccaaggccaggagtcccagacagagctgcctaatccccgaatcagctgcccagaaggcaccaatgcctatcgctcctactgctactactttaatgaagaccctgagacctgggttgatgcagatctctattgccagaacatgaattcaggcaacctggtgtctgtgctcacccaggcggagggtgccttcgtggcctcactgattaaggagagtagcactgatgacagcaatgtctggattggcctccatgacccaaaaaagaaccgccgctggcactggagtagtgggtccctggtctcctacaagtcctgggacactggatccccgagcagtgctaatgctggc

SEQ ID NO: 4100 - DNA, 284 bp, Homo sapiens
ctatgttcaattggatgtatctgttcaaatttattcccacgtgacgtggaagtccttcgttggatgtcacaacactacatttaaggttggtaaggatgacttggaggtccatggttttcattaccaacattttaagattctgaatgtcgatggagtctcactgaagagtcaccaaaggtgcctgccctcctcccctgctgggaagtgtcagttggagactgtcccaagggtgctgaagaatccagtggcaggggttctggctgctttccatctgagtgtgggat

SEQ ID NO: 4101 - DNA, 260 bp, Homo sapiens
gatgctccggctgctcagttccctcctccttgtggccgttgcctcaggctatggcccaccttcctctcgcccttccagccgcgttgtcaatggtgaggatgcggtcccctacagctggccctggcaggtttccctgcagtatgagaaaagtggaagcttctaccacacgtgtggcggtagcctcatcgcccccgactgggttgtgactgccggccactgcatctcgagctcctggacctaccaggtggtgttgggcgagt

SEQ ID NO: 4102 - DNA, 551 bp, Homo sapiens
cggggaggctcctgcctgagcttccttccccagctttgctgcctgagaggaaccagagcagacgcacaggccggaaaaggcgcatctaacgcgtatctaggctttggtaactgcggacaagttgcttttacctgatttgatgatacatttcattaaggttccagttataaatattttgttaatatttattaagtgactatagaatgcaactccatttaccagtaacttattttaaatatgcctagtaacacatatgtagtataatttctagaaacaaacatctaataagtatataatcctgtgaaaatatgaggcttgataataggttgtcacgatgaagcatgctagaagctgtaacagaatacatagagaataatgaggagtttatgatggaaccttaaatatataatgttgccagcgattttagttcaatatttgttactgttatctatctgctgtatatggaattcttttaattcaaacgctgaaaagaatcagcatttagtcttgccaggcacacccaataatcagtcatgtgtaatatgcacaag

SEQ ID NO: 4103 - DNA, 487 bp, Homo sapiens
  misc_feature 393, 429, 461: n = A,T,C or G
gaaaactggctggccaatgtgtgcaagaatctgttcaaggtggaaagtgtgaactgtatctgtgtggactggaaaggtggctcccgaactggatacacacaagcctcgcagaacatcaggatcgtgggagcagaagtggcatattttgttgaatttcttcagtcggcgttcggttactcaccttccaacgtgcatgtcattggccacagcctgggtgcccacgctgctggggaggctggaaggagaaccaatgggaccattggacgcatcacagggttggacccagcagaaccttgctttcagggcacacctgaattagtccgattggaccccagcgatgccaaatttgtggatgtaattcacacggatggtgcccccatagtccccaatttnggggtttgggaatgagccaagtcgtgggccacctanatttctttccaaatggaggagtggaaatgccntggatgtaaaaagaacattctctctc

SEQ ID NO: 4104 - DNA, 331 bp, Homo sapiens
acgagtggattgtcagatatgccttgatggaagagagtttgttgtggatgaaatcagccagggccttggtctccttttcagactctgcggcaggtccacagtaagtttcatcacaggggtttcgagaggctccaatttcacaccaaccagcatcaaaatttctgttggggtctgtgccaatgcagctagatccagtatgggtggagcgagtctttctccaaaatcggctcttggtccaggtgtagatgtagccatcaatattgagcacaggcaggacataaaagtctaacttgtcgagaagctctgtcacttggatctcacgtccataggt

SEQ ID NO: 4105 - DNA, 483 bp, Homo sapiens
gtactatctggtttgagagtgcccttgaaaatttcatactacttagagtttcctttatttccgaacaaagaaactagtatgtgtcctgtaaccttttttccagacagtgtgacagataccttatacctccaacgtgcaaaattactggcatcaccagtgtctagataaaatttctggcccacatcatttgttttcccaggatatctatcagcatagtgacccatctgtgggcagcctccacttggacaagggaaacacttgtttgcagtgaagacgttgtaagaggcacaggggaatccagcaaagccatcagggttgacgatgctatcagtgtaatatttgtagcttcttaagtgattacaggccgcaaagtctcgagtcccttcccagattccgtctatgtccacaatctgagagagaatgttctttttacatccaggcatttccactccttcatttggaaagaaatctaggtggcccacg

SEQ ID NO: 4106 - DNA, 495 bp, Homo sapiens
  misc_feature 428, 460: n = A,T,C or G
agaaaactggctggccaatgtgtgcaagaatctgttcaaggtggaaagtgtgaactgtatctgtgtggactggaaaggtggctcccgaactggatacacacaagcctcgcagaacatcaggatcgtgggagcagaagtggcatattttgttgaatttcttcagtcggcgttcggttactcaccttccaacgtgcatgtcattggccacagcctgggtgcccacgctgctggggaggctggaaggagaaccaatgggaccattggacgcatcacagggttggacccagcagaaccttgctttcagggcacacctgaattagtccgattggaccccagcgatgccaaatttgtggatgtaattcacacggatggtgcccccatagtccccaatttggggcttggaatgagccaagtcgtgggccacctanatttctttccaaatggaggagtggaaatgccntggatgtaaaaagaacattctctctcagattgtgg

SEQ ID NO: 4107 - DNA, 184 bp, Homo sapiens
tgcagcatgatgctgcccccttggaccctcggccttctcctgctggccacagtcagaggaaaagaggtctgctacggacaacttggctgcttttctgatgaaaaaccatgggcaggaacccttcagcgacctgtaaaattacttccctggtcccccgaggacattgacacccgctttcttctgt

SEQ ID NO: 4108 - DNA, 449 bp, Homo sapiens
ggaattcattgcttggctggtgaaaggccgaggaaggcgagatttcccagaagaggtcgccattgttgaagaacttggccgcagacatgctgatggttctttctctgatgagatgaacaccattcttgataatcttgccgccagggactttataaactggttgattcagaccaaaatcactgacaggaaataactatatcactattcaagatcatcttcacaacatcacctgctagccacgtgggatgtttgaaatgttaagtcctgtaaatttaagaggtgtattctgaggccacattgctttgcatgccaataaataaattttcttttagtgttgtgtagccaaaaattacaaatggaataaagttttatcaaaatattgctaaaatatcagctttaaaatatgaaagtgctagattctgttattttcttcttattttggatgaagt

SEQ ID NO: 4109 - DNA, 212 bp, Homo sapiens
acactcaaactttatttggttgcctggatggggccagagaggaggacaagaagggtgtcaaagggtcagctcagtaggggtgattcagggtgtgctccatgatggtcagaagcgccagccacgtctccttggctgtggggatgatctgggaggctggcagcaggaagccatagcgcccagtgtcccggagctcgaaggtgaaggagtacctg

SEQ ID NO: 4110 - DNA, 175 bp, Homo sapiens
gtccatggtgaggatgcggtcccctacagctggccctggcaggtttccctgcagtatgagaaaagtggaagcttctaccacacgtgtggcggtagcctcatcgcccccgattgggttgtgactgccggccactgcatctcgagggatctgacctaccaggtggtgttgggtgagt

SEQ ID NO: 4111 - DNA, 217 bp, Homo sapiens
acaaaaaaaagcacattcctagaaaaaggtattggcaaatagtaaaaatgggaggtcaaaagcaaaaaaaaaaaaaaaaaaaaaaacaaaacaaaaaaaagaaaaaaccaacaattcttcaattcagtgtgcaaacattatataaaaatagaaatactaactctacaggcagtatttcctgataaattatttaaatagcatatctacacaatctgag

SEQ ID NO: 4112 - DNA, 375 bp, Homo sapiens
accggttggaaggcactccctggtgtaatctgagatactgcacaggtgagcagcagagccctggaggaggcagctacacagccaatgagatgcctcccaggctcagtagagtgagtggagcaagtcaagaggagacaggagaggatgcagagcagcctcgactcagctcctgcccagtgagaactcaacacaggggttgagaccttccaacatttcaagccagaaattcccattcaagggtgaaatttcctagtttataaatgtgtgtagcataaaatccagaactcatgctcgttccgattttggctccatttgagaagtttaatttgcctccctgagcctcagtgttctgatctgaaaaaaaggggggggggt

SEQ ID NO: 4113 - DNA, 602 bp, Homo sapiens
  misc_feature 548, 573: n = A,T,C or G
acagctgggttgtttctttgattcctcctgccccattgagccatacctacagagagcagctgtgaaaaactatcactttcaacaatgaagaatagtaatatgtcataatggagattatgaagttcagaaaggggtaaatgcagttttggggagggctgagactaagagagaacacaataagacaggcaattaagactgacatgaaagatcagttacattgataggatatactcttgatatgatataatgagaatggcagtttaccgctgtggttttcttttcccaaaacccataaccacagcctaaccatgagaaagacatcaaacaaatcccaatttgggacattctgtagaatacctaacccagtattccttaaaaacaatgaaagtcagagatactgtcacagccaagaggagcctagggagacatgacaactaagtgtaatgtggtatcctggatagaattctagaacagaaaaaaattaaaaactaaagaaatcatgtatgagcttcagttaataaggtatcaatattgtttcattaattttngtcaaatttaccatactaatgtaangatgtcactattataggggaaactggctg

SEQ ID NO: 4114 - DNA, 198 bp, Homo sapiens
actgtgaggtttgatttgtgtgacagaatctggcttccagaagtcaatctgggtcgtgctggccaactcgcggattatgttaatgtgattttcatcttcaacgttaacacggaacaccttctcgccttcaaagtgctcaccaccatgatgagcagatgccagggccacagtcaccagaaccaagagtgccaacattgt

SEQ ID NO: 4115 - DNA, 331 bp, Homo sapiens; identical to SEQ ID NO: 3099

SEQ ID NO: 4116 - DNA, 331 bp, Homo sapiens; identical to SEQ ID NO: 3099

SEQ ID NO: 4117 - DNA, 331 bp, Homo sapiens; identical to SEQ ID NO: 3099

SEQ ID NO: 4118 - DNA, 351 bp, Homo sapiens
actccagcctgggtgacagagcgagactctgtctcaaaaaaaaaaaaaaaaaaaaatatcaatccaagatttttattaagttaaaatgaaggaactaaaaataggtaaatgaaaatgttataacactttagtgctatttatgagtatgaacaaaggaatttaatcacattgaatcccaattacagatgaatcttttatttcatgggtgctgggtatgtggtctttttaagacaaaaattctacagcatggttttactaagtcagattgagtaggtcgcatctctgtgtgccacacagaacttttagacaagagtagaggggaaaaggttctgcaattcctcacagtaaagt

SEQ ID NO: 4119 - DNA, 411 bp, Homo sapiens; identical to SEQ ID NO: 3041

SEQ ID NO: 4120 - DNA, 331 bp, Homo sapiens; identical to SEQ ID NO: 3099

SEQ ID NO: 4121 - DNA, 331 bp, Homo sapiens; identical to SEQ ID NO: 3037

SEQ ID NO: 4122 - DNA, 126 bp, Homo sapiens
ggcgagaaggtgttccgtgttaacgttgaagatgaaaatcacattaacataatccgcgagttggccagcacgacccagattgacttctggaagccagattctgtcacacaaatcaaacctcacagt

SEQ ID NO: 4123 - DNA, 331 bp, Homo sapiens
acctatggacgtgagatccaagtgacagagcttctcaacaagttagacttttatgtcctgcctgtgctcaatattgatggctacatctacacctggaccaagagccgattttggagaaagactcgctccacccatactggatctagctgcattggcacagaccccaacagaaattttgatgctggttggtgtgaaattggagcctctcgaaacccctgtgatgaaacttactgtggacctgccgcagagtctgaaaaggagaccaaggccctggctgatttcattcgcaacaaactctcttccatcaaggcatatctgacaatccactcgt

SEQ ID NO: 4124 - DNA, 162 bp, Homo sapiens
actgtgaggtttgatttgtgtgacagaatctggcttccagaagtcagtctgggtcgtgctggccaactcgcggattatgttaatgtgattttcatcttcaacgttaacacggaacaccttctcgccttcaaagtgctcaccaccatgatgagcagatgccag

SEQ ID NO: 4125 - DNA, 541 bp, Homo sapiens
  misc_feature 467, 468: n = A,T,C or G
attatctggtttgagagtgcccttgaaaatttcatactgcttagagtttcctttatttccgaacaaagaaactagtatgtgtcctgtaaccttttttccagacagtgtgacagataccttatacctccaacgtgcaaaattactggcatcaccagtgtctagataaaatttctggcccacatcatttgttttcccaggatatctatcagcatagtgacccatctgtgggcagcctccacttggacaagggaaacacttgtttgcagtgaagacgttgtaagaggcacaggggaatccagcaaagccatcagggttgacgatgctatcagtgtaatatttgtagcttcttaagtgattacaggccgcaaagtctcgagtcccttcccagattccgtctatgtccacaatctgagagagaatgttctttttacatccaggcatttccactcctccattttggaaagaannctaggtggcccacgacttggctcattccaaaccccaaattggggactatgggggcaccatccgtgtgaattac

SEQ ID NO: 4126 - DNA, 411 bp, Homo sapiens; identical to SEQ ID NO: 3041

SEQ ID NO: 4127 - DNA, 478 bp, Homo sapiens
acccataggggaacatcagcagctgggaatagctgtggagggtaatgaaggccttgacttttccatgactcttgatgaagtccactatggatttcacttcaacttcagagttggcactgggtccgtggtatgaatcagagcaagggttgctgctggctccaggtcctccaaaacctgcatcccagttccggttagggtccacaccaacacagaggcttccagataccttggaccgggtcttccgccacatacgatttttggtttgagagaacacgtatccatcagggtttgtgactggcaggaggaagatatccagggcatccagaatggaagtgatggatgggtcctttccataatcagaaacaatcttatttgctgtccaaagtgccgtagcttgtgtaacccactctcgagcatggatcccagcatccagccagatagctggcttgtctcctccggtgctgaacttgagcacgtt

SEQ ID NO: 4128 - DNA, 294 bp, Homo sapiens
acccaggggacaatgccacaccagagcagatggcccagtatgcagctgatctccgtagatacatcaacatgctgaccaggcctaggtatgggaaaagacacaaagaggacacgctggccttctcggagtgggggtccccgcatgctgctgtccccagggagctcagcccgctggacttataatgccaccttctgtctcctacgactccatgagcagcgccagcccagctctcccctctgcacccttggctctggccaaagcttgctccctgctcccacacaggctcaataaagc

SEQ ID NO: 4129 - DNA, 331 bp, Homo sapiens; identical to SEQ ID NO: 3099

SEQ ID NO: 4130 - DNA, 550 bp, Homo sapiens
actatctggtttgagagtgcccttgaaaatttcatactgcttagagtttcctttatttccgaacaaagaaactagtatgtgtcctgtaaccttttttccagacagtgtgacagataccttatacctccaacgtgcaaaattactggcatcaccagtgtctagataaaatttctggcccacatcatttgttttcccaggatatctatcagcatagtgacccatctgtgggcagcctccacttggacaagggaaacacttgtttgcagtgaagacgttgtaagaggcacaggggaatccagcaaagccatcagggttgacgatgctatcagtgtaatatttgtagcttcttaagtgattacaggccgcaaagtctcgagtcccttcccagattccgtctatgtccacaatctgagagagaatgttctttttacatccaggcatttccactcctccatttggaaagaaatctaggtggcccacgacttggctcattccaaaccccaaattggggactatgggggcaccatccgtgtgaattacatccacaatt

SEQ ID NO: 4131 - DNA, 545 bp, Homo sapiens
actatctggtttgagagtgcccttgaaaatttcatactgcttagagtttcctttatttccgaacaaagaaactagtatgtgtcctgtaaccttttttccagacagtgtgacagataccttatacctccaacgtgcaaaattactggcatcaccagtgtctagataaaatttctggcccacatcatttgttttcccaggatatctatcagcatagtgacccatctgtgggcagcctccacttggacaagggaaacacttgtttgcagtgaagacgttgtaagaggcacaggggaatccagcaaagccatcagggttgacgatgctatcagtgtaatatttgtagcttcttaagtgattacaggccgcaaagtctcgagtcccttcccagattccgtctatgtccacaatctgagagagaatgttctttttacatccaggcatttccactcctccatttggaaagaaatctaggtggcccacgacttggctcattccaaaccccaaattggggactatgggggcaccatccgtgtgaattacatcca

SEQ ID NO: 4132 - DNA, 411 bp, Homo sapiens
  misc_feature 387, 404, 405: n = A,T,C or G
ctagatttctttccaaatggaggagtggaaatgcctggatgtaaaaagaacattctctctcagattgtggacatagacggaatctgggaagggactcgagactttgcggcctgtaatcacttaagaagctacaaatattacactgatagcatcgtcaaccctgatggctttgctggattcccctgtgcctcttacaacgtcttcactgcaaacaagtgtttcccttgtccaagtggaggctgcccacagatgggtcactatgctgatagatatcctgggaaaacaaatgatgtgggccagaaattttatctagacactggtgatgccagtaattttgcacgttggaggtataaggtatctgtcacactgtctggaaaaaaggttacnggacacatactagtttnnttgttc

SEQ ID NO: 4133 - DNA, 262 bp, Homo sapiens
  misc_feature 35, 48, 98, 101, 113, 126, 145, 146, 149, 157, 160, 163,172, 183, 254: n = A,T,C or G
actcattccaatgaatttgactcagatgtggatgntggggacttgcanatggttaaatttatttggtataacaatgtgatcaacccaactttacctanagngggagcatccangattatagtgganacaaatgttggaaaacagnncancttctgtngtncanaaaccgtcngggaggaagtnctgctcaccctcacaccgtgttaggagactactgttatttgaccaatgaattgacttctaataaaatctantggtgatg

SEQ ID NO: 4134 - DNA, 560 bp, Homo sapiens
actatctggtttgagagtgcccttgaaaatttcatactgcttagagtttcctttatttccgaacaaagaaactagtatgtgtcctgtaaccttttttccagacagtgtgacagataccttatacctccaacgtgcaaaattactggcatcaccagtgtctagataaaatttctggcccacatcatttgttttcccaggatatctatcagcatagtgacccatctgtgggcagcctccacttggacaagggaaacacttgtttgcagtgaagacgttgtaagaggcacaggggaatccagcaaagccatcagggttgacgatgctatcagtgtaatatttgtagcttcttaagtgattacaggccgcaaagtctcgagtcccttcccagattccgtctatgtccacaatctgagagagaatgttctttttacatccaggcatttccactcctccatttggaaagaaatctaggtggcccacgacttggctcattccaaaccccaaattggggactatgggggcaccatccgtgtgaattacatccacaaatttggcatcgc

SEQ ID NO: 4135 - DNA, 472 bp, Homo sapiens
acttgatgccctggctgtaggtccagtcaatagtgcttccactggcttgatctggggcaggagtaaaataggagagaaagggtcaatcactttgggaatatttacacgggttgggttaacgatccaaccctgtccaaagctctgtgccttgtgcaatgctgagtggagtcagtgtctactaaggtctgctgttgaccaagcagcctcacttccaagaaactcccactaaaaggtctaagccaagaggtccaaagaggagaccagcaatggttcccctattcactaggggatgcaaggaagtctctgcaattgcacaagcccctctgaaaacagcctctgtccaacagccctttcggtgaagcccctaaatataccgagttccctgcttgggtaaccaggatttgttcccctggggctctggtctgtgagggggaaagtgcaaagagccagagtcaaagcaaaagccccttgt

SEQ ID NO: 4136 - DNA, 543 bp, Homo sapiens
ctcatcggagctgcatgggaagtctgcatacagcaaagtgacctgcatgcctcaccttatggaaaggatggtgggctctggcctcctgtggctggccttggtctcctgcattctgacccaggcatctgcagtgcagcgagacccatccactgtggaggacaagtgtgagaaggcctgccgccccgaggaggagtgccttgccctcaacagcacctggggctgtttctgcagacaggacctcaatagttctgatgtccacagtttgcagcctcagctagactgtgggcccagggagatcaaggtgaaggtggacaaatgtttgctgggaggcctgggtttgggggaggaggtcattgcctacctgcgagacccaaactgcagcagcatcttgcagacagaggagaggaactgggtatctgtgaccagccccgtccaggctagtgcctgcaggaacattctggagagaaatcaaacccatgccatctacaaaaacaccctctccttggtcaatgatttcatcatcagagacaccatcctcaacat

SEQ ID NO: 4137 - DNA, 528 bp, Homo sapiens
ctggaaaggtggctcccgaactggatacacacaagcctcgcagaacatcaggatcgtgggagcagaagtggcatattttgttgaatttcttcagtcggcgttcggttactcaccttccaacgtgcatgtcattggccacagcctgggtgcccacgctgctggggaggctggaaggagaaccaatgggaccattggacgcatcacagggttggacccagcagaaccttgctttcagggcacacctgaattagtccgattggaccccagcgatgccaaatttgtggatgtaattcacacggatggtgcccccatagtccccaatttggggtttggaatgagccaagtcgtgggccacctagatttctttccaaatggaggagtggaaatgcctggatgtaaaaagaacattctctctcagattgtggacatagacggaatctgggaagggactcgagactttgcggcctgtaatcacttaagaagctacaaatattacactgatagcatcgtcaaccctgatggctttgc

SEQ ID NO: 4138 - DNA, 542 bp, Homo sapiens
cggaactgccacgatgctgccactttggactctttcactgctgctgggagcagtagcaggaaaagaagtttgctacgaaagactcggctgcttcagtgatgactccccatggtcaggaattacggaaagacccctccatatattgccttggtctccaaaagatgtcaacacccgcttcctcctatatactaatgagaacccaaacaactttcaagaagttgccgcagattcatcaagcatcagtggctccaatttcaaaacaaatagaaaaactcgctttattattcatggattcatagacaagggagaagaaaactggctggccaatgtgtgcaagaatctgttcaaggtggaaagtgtgaactgtatctgtgtggactggaaaggtggctcccgaactggatacacacaagcctcgcagaacatcaggatcgtgggagcagaagtggcatattttgttgaatttcttcagtcggcgttcggttactcaccttccaacgtgcatgtcattggccacagcctgggtgcccacgctgctgggg

SEQ ID NO: 4139 - DNA, 468 bp, Homo sapiens
actgaagcctgatacaatacccaacagtattgctctggttttttcaagcacacactccaagcaagtggtcagtctggcttaattcattatggctttttttcagggtaagagattcacacgcaagagaataaggctacaaatgctccaaacatgggtccagaactctggctcttttgtgaggcctagagtcacagaaaatgccatctgttaagaagctgcttttgcataaaaaaaatataaaaagttacaaaattccatcaaagacagatacacagtataaatcgttaggtgaacacagaaggctggtctcatctcctgcagtggcccatagacctgccctgaggtctggaagttcactgtcctgagggtccaggaactcctgcctgctggctgggctctaggaagaaggagggtttggctgggcccgcccagctccccatgacactgtcactgtgatgccactgttgt

SEQ ID NO: 4140 - DNA, 331 bp, Homo sapiens; identical to SEQ ID NO: 3009

SEQ ID NO: 4141 - DNA, 535 bp, Homo sapiens
acttcactgcggacttgacttcttgagcaagaaggctggcactgttcattaagagaatcacagagatgaatctcacaatgcaggaaaactaggtcataatgtccagcaaacatgaacatctgaactgagaaccggctttccgaggactgcccattctcctccacgtggatggtggaatcacgctgatttgagcagctgtttctgatgatgaaatacttcacaaggtcagccttgtcttcagtgggggtggcatagcagttcctcaacaccaggttaaaccgggaggtgtccccttgttccaagatggcacccacatacagcacggactcaacagacagttcaactgcatccccttcgtaaggattcgtgtagttctggtcttggaagagggccatcctgacaatgaactctccattcccgtccacactgacgttcagggaacttacaatgggctgcaaggcagcttggaggctgactttcatgtccagtgggtaggcacattggaagttgatgttgaggatggtgtctctgatga

SEQ ID NO: 4142 - DNA, 230 bp, Homo sapiens
acgaacagcctctcttacaaaccactggcagaatgcaggagaaatccactctctggcatggaaaccacagtccacgaaaatggcaggcttattttgtccagctttgccaaccttcaggaggtaaatagcgcgtccctcaaatgtggttccgataacactgcgagagatgagggctggattctcagtggcgacttgttgagtccaagcctctatcgtttcccacttgttgt

SEQ ID NO: 4143 - DNA, 331 bp, Homo sapiens
acctatggacgcgagatccaagtgacagagcttctcaacaagttagacttttatgtcctgcctgtgctcaatattgatggctacatctacacctggaccaagagccgattttggagaaagactcgctccacccatactggatctagctgcattggcacagaccccaacagaaattttgatgctggttggtgtgaaattggagcctctcgaaacccctgtgatgaaacttactgtggacctgccgcagagtctgaaaaggagaccaaggccctggctgatttcatccgcaacaaactctcttccatcaaggcatatctgacaatccactcgt

SEQ ID NO: 4144 - DNA, 539 bp, Homo sapiens
gacggaactgccacgatgctgccactttggactctttcactgctgctgggagcagtagcaggaaaagaagtttgctacgaaagactcggctgcttcagtgatgactccccatggtcaggaattacggaaagacccctccatatattgccttggtctccaaaagatgtcaacacccgcttcctcctatatactaatgagaacccaaacaactttcaagaagttgccgcagattcatcaagcatcagtggctccaatttcaaaacaaatagaaaaactcgctttattattcatggattcatagacaagggagaagaaaactggctggccaatgtgtgcaagaatctgttcaaggtggaaagtgtgaactgtatctgtgtggactggaaaggtggctcccgaactggatacacacaagcctcgcagaacatcaggatcgtgggagcagaagtggcatattttgttgaatttcttcagtcggcgttcggttactcaccttccaacgtgcatgtcattggccacagcctgggtgcccacgctgc

SEQ ID NO: 4145 - DNA, 212 bp, Homo sapiens
actgggatcagaatacatgatggatgaaattctttacatgttttagcagaatgaatttgtttaatataataaagtttgctacttatctgtatgtaggttgctaaaaaggattttcttaactcagattttaagccaaataaccatttaacactagtatttgttaaatgggttatttttctgtatttgtatgtttcactataataagggaatta

SEQ ID NO: 4146 - DNA, 331 bp, Homo sapiens; identical to SEQ ID NO: 3099

SEQ ID NO: 4147 - DNA, 539 bp, Homo sapiens; identical to SEQ ID NO: 4144

SEQ ID NO: 4148 - DNA, 480 bp, Homo sapiens
acctgcaggcccggaggcccccagggctggaatactgctacaaccccagccacaacccagaggagcagctctcctccaaggacctggtgtcctgcgcctaccaggtggcccgaggcatggagtatctggcctccaagaagtgcatacaccgagacctggcagccaggaatgtcctggtgacagaggacaatgtgatgaagatagcagactttggcctcgcacgggacattcaccacatcgactactataaaaagacaaccaacggccgactgcctgtgaagtggatggcacccgaggcattatttgaccggatctacacccaccagagtgatgtgtggtctttcggggtgctcctgtgggagatcttcactctgggcggctccccataccccggtgtgcctgtggaggaacttttcaagctgctgaaggagggtcaccgcatggacaagcccagtaactgcaccaacgagctgtacctgc

SEQ ID NO: 4149 - DNA, 186 bp, Homo sapiens
  misc_feature 98, 142, 145, 165: n = A,T,C or G
acagaagaaagcgggtgtcaatgtcctcgggggaccagggaagtaattttacaggtcgctgaagggttcctgcccatggtttttcatcagaaaagcanccaagttgtccgtagcagacctcttttcctctgactgtggccancangagaaggccgagggtccaanggggcagcatcatgctgcacc

SEQ ID NO: 4150 - DNA, 626 bp, Homo sapiens
  misc_feature 562: n = A,T,C or G
cggaactgccacgatgctgccactttggactctttcattgctgctgggagcagtagcaggaaaaggagtttgctacgaaagactcggctgcttcagtgatgactccccatggtcaggaattacggaaagacccctccatatattgccttggtctccaaaagatgtcaacacccgcttcctcctatatactaatgagaacccaaacaactttcaagaagttgccgcagattcatcaagcatcagtggctccaatttcaaaacaaatagaaaaactcgctttattattcatggattcatagacaagggagaagaaaactggctggccaatgtgtgcaagaatctgttcaaggtggaaagtgtgaactgtatctgtgtggactggaaaggtggctcccgaactggatacacacaagcctcgcagaacatcaggatcgtgggagcagaagtggcatattttgttgaatttcttcagtcggcgttcggttactcaccttccaacgtgcatgtcattggccacagcctgggtgcccacgctgctggggaggctggaaggagaaccaantgggaccattggacgcatcacagggttggacccagcagaaccttgctttcagggcacacctgaa

SEQ ID NO: 4151 - DNA, 331 bp, Homo sapiens; identical to SEQ ID NO: 3099

SEQ ID NO: 4152 - DNA, 265 bp, Homo sapiens
tgcaaacaagtgtttcccttgtccaagtggaggctgcccacagatgggtcgctatgctgatagatatcctgggaaaacaaatgatgtgggccagaaattttatctagacactggtgatgccagtaattttgcacgttggaggtataaggtatctgtcacactgtctggaaaaaaggttacaggacacatactagtttctttgttcggaaataaaggaaactctaagcagtatgaaattttcaagggcactctcaaaccagatagt

SEQ ID NO: 4153 - DNA, 521 bp, Homo sapiens
actgaagatcagcgatgtaaactcattagggaggagatggtctgaactgagttggagacatagtctagtttaatttttgacttcatagtaattgcaggaccagttctagacatccatttttcagcttcctctagtttttgaacttgcaaacaaaggagaacttctcctcacaagattcatccttccatttcttgaatcctgagcatgaagtcagacttgcacagtagccagcattagcactgctcggggatccagtgtcccaggacttgtaggagaccagggacccactactccagtgccagcggcggttctagatggagaagggccagaacaggggccatggtcactcaaaaatcaatagaataaccaggcctgtgtgcacactcagaaacaggccaagttatagcagaaagaataaacattattgtcaccatgaatatcatatcatttcctctgcttttgctctaagcttctccttctctagaatgtccgaattcctcctcctcttccagcaaataata

SEQ ID NO: 4154 - DNA, 533 bp, Homo sapiens
acaagaacctcactcactggacattgaaattctactgtccaatcccaactcactgctgttgattggaaacctgattctggcagctcatttatcttggtttcctcatttgtaaggtcgttcagttggactgatcatctctgagggccttgaagccctaacaagtctatcatgatcccagatgtaaaatatatatatatgtgtgtatatatataatttcagctgagaagtgagtcttcacaccaagtctactttttgcaagttactgggtttctgtcttcaccatcttctgaaaagtctgcttctgttggttcagtttctggggtcatctgagtagagagattctgaaacagacactgatgttaatttgggggactacttttctcatgcaaacaggggagctcctagcaatcctgagaggtgctgcatccacatggtatgtggtgagacctttttgattaggaaataacagacacgtcctcataacattaaacaggttccacatcctactgtgcaattcccatctgaggacctgg

SEQ ID NO: 4155 - DNA, 80 bp, Homo sapiens; identical to SEQ ID NO: 3121

SEQ ID NO: 4156 - DNA, 411 bp, Homo sapiens; identical to SEQ ID NO: 3041

SEQ ID NO: 4157 - DNA, 388 bp, Homo sapiens
actatgcctggctgcagtcagagagagtctcgggaggagcaggtctttgtgctctagggcaggacacagtgctctaggtgggaactggtgccccaggtgggaccgaattccccaggtgagacttagagagacccggtgctccaggtggatctaatattccaggaaggacctggtgctccagggtcctgatgccccaagagcttgccccctatgcctggatgtgtgaagctgtgtgttttctcttcaagaggggacacagatgcctggagggtaaatgtcccaaacttggctcctcggggcatgtaaaattgtgtgtgagaggcagggagagctgaagagagaaaaggacagaaggatagggacacgcacataggtctgtagactaagt

SEQ ID NO: 4158 - DNA, 551 bp, Homo sapiens
  misc_feature 328, 439, 440, 458, 459: n = A,T,C or G
cgctgctggggaggctggaaggagaaccaatgggaccattggacgcatcacagggttggacccagcagaaccttgctttcagggcacacctgaattagtccgattggaccccagcgatgccaaatttgtggatgtaattcacacggatggtgcccccatagtccccaatttggggtttggaatgagccaagtcgtgggccacctagatttctttccaaatggaggagtggaaatgcctggatgtaaaaagaacattctctctcagattgtggacatagacggaatctgggaagggactcgagactttgcggcctgtaatcacttaagnagctacaaatattacactgatagcatcgtcaaccctgatggctttgctggattcccctgtgcctcttacaacgtcttcactgcaaacaagtgtttcccttgtccaagtggnngctgcccacagatgggtnnctatgctgatagatatcctgggaaaacaaatgatgtgggccagaaattttatctagacactggtgatgccagtaattttgcacgttggaggt

SEQ ID NO: 4159 - DNA, 300 bp, Homo sapiens
ggcactggagtagtgggtccctggtctcctacaagtcctgggacactggatccccgagcagtgctaatgctggctactgtgcaagcctgacttcatgctcaggattcaagaaatggaaggatgaatcttgtgagaagaagttctcctttgtttgcaagttcaaaaactagaggaagctgaaaaatggatgtctagaactggtcctgcaattactatgaagtcaaaaattaaactagactatgtctccaactcagttcagaccatctcctccctaatgagtttgcatcgctgatcttcagt

SEQ ID NO: 4160 - DNA, 331 bp, Homo sapiens; identical to SEQ ID NO: 3099

SEQ ID NO: 4161 - DNA, 318 bp, Homo sapiens
gtcaaccctgatggctttgctggattcccctgtgcctcttacaacgtcttcactgcaaacaagtgtttcccttgtccaagtggaggctgcccacagatgggtcactatgctgatagatatcctgggaaaacaaatgatgtgggccagaaattttatctagacactggtgatgccagtaattttgcacgttggaggtataaggtatctgtcacactgtctggaaaaaaggttacaggacacatactagtttctttgttcggaaataaaggaaactctaagcagtatgaaattttcaagggcactctcaaaccagatagt

SEQ ID NO: 4162 - DNA, 526 bp, Homo sapiens
  misc_feature 46, 88, 110, 115, 118, 218, 221, 226, 253, 269, 292, 301,319, 351, 370, 377, 391, 397, 414, 433, 438, 440, 450, 453,457, 470, 520: n = A,T,C or G
acaagctttttttttttttttttttttttttttttttttttttttngaggacatgcatttaattttaaattttacaatttaaattcancatgaattgcaataaatggatnttcancanagttactaataaaaaaatgagctttgccatcatcaaaaacgtaaattttaatgcctgtgcaattgccattaattttatctccaaaaatgacatcacagtntgngccancaggaaaaccagtttgcaaagttaaanaaaatgaccagtcatnattgttgaaaacaatgaatcctntgtttcctntcccaaaagccacttggntgctcccattatcataccaatttgtaaaaggntggccatccactacattgnggaaaanaaccatgttccttntttggngccatcgatgttcacanacccagtcattgccacaangtagngnctggattaanagnaacnttctttaattacnccattattattggggggcccaacccaatcattaacatcgtttccattttnaaactg

SEQ ID NO: 4163 - DNA, 289 bp, Homo sapiens
aggacttctagcccctgaactttcagccgaatacatcttttccaaaggagtgaattcaggcccttgtatcactggcagcaggacgtgaccatggagaagctgttgtgtttcttggtcttgaccagcctctctcatgcttttggccagacagacatgtcgaggaaggcttttgtgtttcccaaagagtcggatacttcctatgtatccctcaaagcaccgttaacgaagcctctcaaagccttcactgtgtgcctccacttctacacggaactgtcctcgacccgtgggt

SEQ ID NO: 4164 - DNA, 388 bp, Homo sapiens; identical to SEQ ID NO: 4157

SEQ ID NO: 4165 - DNA, 246 bp, Homo sapiens
acatggcttccagcctaacgggatatggatagcgctcctccacctgcagcgtcttcttcagcagcaccatgccaaacttgcccttctccagcttcaggaagctcatcagcttagggatgaggctagggtccaggggctgctccaggatctggccctcgctggtgatccttctcaccttgcctccttcctcacctgcctggtggaagagcacaatctgttggatgtgcctctccgccagctcacagt

SEQ ID NO: 4166 - DNA, 187 bp, Homo sapiens
acagaagaaagcgggtgtcaatgtcctcgggggaccagggaagtaattttacaggtcgctgaagggttcctgcccatggtttttcatcagaaaagcagccaagttgtccgtagcagacctcttttcctctgactgtggccagcaggagaaggccgagggtccaagggggcagcatcatgctgcacca

SEQ ID NO: 4167 - DNA, 558 bp, Homo sapiens
  misc_feature 545: n = A,T,C or G
gtgggctctggcctcctgtggctggccttggcctcctgcattctgacccaggcatctgcagtgcagcgagacccatccactgtggaggacaagtgtgagaaggcctgccgccccgaggaggagtgccttgccctcaacagcacctggggctgtttctgcagacaggacctcaatagttctgatgtccacagtttgcagcctcagctagactgtgggcccagggagatcaaggtgaaggtggacaaatgtttgctgggaggcctgggtttgggggaggaggtcattgcctacctgcgagacccaaactgcagcagcatcttgcagacagaggagaggaactgggtatctgtgaccagccccgtccaggctagtgcctgcaggaacattctggagagaaatcaaacccatgccatctacaaaaacaccctctccttggtcaatgatttcatcatcagagacaccatcctcaacatcaacttccaatgtgcctacccactggacatgaaagtcagcctccaagctgccttgcagcccattgtaagttncctgaacgtcagt

SEQ ID NO: 4168 - DNA, 536 bp, Homo sapiens
  misc_feature 445, 468, 487: n = A,T,C or G
acccaaaaccatattcatcttcccctctgaacgttctgcttctcctaagagctacttctatattcagttgtaaaagtgagaaccttgtgagacatcacagacttctctatgctcgctcctcccataaattaaggagaaagtttgatctctttcacatggcaagaggagcttcaccttaccgtctctacttgctctttcagcttctccttcacttccctagaatgtctcttacacttaactcccactctatgaacacactatgcacttttcctttacttcagctaaattatcttccttacctttctcaactgcatattcctactttatctctgactcaacccaagcatctccccttggaccctgagaattttttcaacattgtatttaatgatagaaaccaaataaactggcttaatactagagacaaaatacttgtattacagcncacaatctagtagtccaaataanactacagatcattacaagnagcttgataagtatccggatgaaataatggcaaggtgtcatagcagctg

SEQ ID NO: 4169 - DNA, 411 bp, Homo sapiens
acctgaagccccgcttagctctgacactctgccaacatcctctgattctaggtgtggtgttgactgtcctttcaaggaaaaacttgcaatagagggaaaagccattaaagcagctccctgcttcatcattaagtcctgtcatccctaccagccaatcccagtcaaagaagttatgctttattcacttctgtggaattacaagtgagagacacttttaggacctgatggacaaagcaggagattcactgtcagctttcctggtcctctccttacttctgtgggccttgcaccgtcttagtttacacatctgccaaaggggtagaattacacttctttttacaggtaaatgtcaaggcacaatcagttttcaggaagtgcttcaagaccccaggtgaaatgaaaatgctaagt

SEQ ID NO: 4170 - DNA, 489 bp, Homo sapiens
  misc_feature 442, 457: n = A,T,C or G
gtgggctctggcctcctgtggctggccttggtctcctgcattctgacccaggcatctgcagtgcagcgagacccatccactgtggaggacaagtgtgagaaggcctgccgccccgaggaggagtgccttgccctcaacagcacctggggctgtttctgcagacaggacctcaatagttctgatgtccacagtttgcagcctcagctagactgtgggcccagggagatcaaggtgaaggtggacaaatgtttgctgggaggcctgggtttgggggaggaggtcattgcctacctgcgagacccaaactgcagcagcatcttgcagacagaggagaggaactgggtatctgtgaccagccccgtccaggctagtgcctgcaggaacattctggagagaaatcaaacccatgccatctacaaaaacaccctctccttggtcaatnatttcatcatcaganacaccatcctcaacatcaacttccaatgtgcc

SEQ ID NO: 4171 - DNA, 331 bp, Homo sapiens; identical to SEQ ID NO: 3037

SEQ ID NO: 4172 - DNA, 574 bp, Homo sapiens
ggaaaatccagaaagctacacaacactgaaggggtgaaataaaagtccagcgatccagcgaaagaaaagagaagtgacagaaacaactttacctggactgaagataaaagcacagacaagagaacaatgccctggacatggctccagagatccacatgacaggcccaatgtgcctcattgagaacactaatggggaactggtggcgaatccagaagctctgaaaatcctgtctgccattacacagcctgtggtggtggtggcaattgtgggcctctaccgcacaggaaaatcctacctgatgaacaagctagctgggaagaataagggcttctctctgggctccacagtgaaatctcacaccaaaggaatctggatgtggtgtgtgcctcaccccaaaaagccagaacacaccttagtcctgcttgacactgagggcctgggagatgtaaagaagggtgacaaccagaatgactcctggatcttcaccctggccgtcctcctgagcagcactctcgtgtatttgacaaaacccactgttcttgtattgtattgcccagggggagctatcactgt

SEQ ID NO: 4173 - DNA, 395 bp, Homo sapiens
  misc_feature 389: n = A,T,C or G
acggccagggctattggttgaatgagtaggctgatggtttcgataataactagtatggggataaggggtgtaggtgtgccttgtggtaagaagtgggctagggcatttttaatcttagagcgaaagcctataatcactgcgcccgctcataaggggatggccatggctaggtttatagatagttgggtggctggtgtaaatgagtgaggcaggagtccgaggaggttagttgtggcaataaaaatgattaaggatactagtataagagatcaggttcgtcctttagtgttgtgtatggttatcatttgttttgaggttagtttgattagtcattgttgggtggtgattagtcggttgttgatgagatatttggaggtggggatcaatanaggggg

SEQ ID NO: 4174 - DNA, 463 bp, Homo sapiens
actgtcactcagtctgtaaactacccccagagggtggtttgtttcctcattccttaaaaaaaaacaaaaacaaataaacaaacaaaaaagaagtttactaaatttaaacactgacatcctgtgaagatgccagtctttacaggcgtttgtaaaagtagactgtggggagtatgttacactaatacaaagttttacaaatgaatacaagtgaaatatataaattacaatgaaatagaggaagattgtggctctgtcctgggttggttcttttagcagtcatattgctgttggtgagagcagcaaaagccacatatgcctccaagcactccatttattacttgaataagacacaagatgaattcaattccaccaagagccaagaggatagaaaacagagatacattccattccacaatgtgcttgggttcagtgcactcggaccatgtggaggtatccagaaggt

SEQ ID NO: 4175 - DNA, 270 bp, Homo sapiens
caaaactcatgatgccccggctgctcagttccctcctccttgtggccgttgcctcaggctatggcccaccttcctctcactcttccagccgcgttgtccatggtgaggatgcggtcccctacagctggccctggcaggtttccctgcagtatgagaaaagtggaagcttctaccacacgtgtggcggtagcctcatcgcccccgattgggttgtgactgccggccactgcatctcgagggatctgacctaccaggtggtgttgggtgagt

SEQ ID NO: 4176 - DNA, 130 bp, Homo sapiens
actatgaacaccagaacagaagagattttttactattatgacacaaacacagggaaagagggcaaactagacattgtaatgcataagatgcaggaaaaagtgcagagcattaactataacccttttgacc

SEQ ID NO: 4177 - DNA, 312 bp, Homo sapiens
  misc_feature 35, 102, 152, 192, 254, 255, 259: n = A,T,C or G
ggcactggagtagtgggtccctggtctcctacaantcctgggacactggatccccgagcagtgctaatgctggctactgtgcaagcctgacttcatgctcangattcaagaaatggaaggatgaatcttgtgagaagaagttctcctttgtntgcaagttcaaaaactagaggaagctgaaaaatggatgtntagaactggtcctgcaattactatgaagtcaaaaattaaactagactatgtctccaactcanntcanaccatctcctccctaatgagtttgcatcgctgatcttcagtacctcggccgga

SEQ ID NO: 4178 - DNA, 331 bp, Homo sapiens; identical to SEQ ID NO: 3099

SEQ ID NO: 4179 - DNA, 556 bp, Homo sapiens
  misc_feature 521: n = A,T,C or G
gtgcccctggtccttgctgtggtggtgttggagccgctgccattgctgggattggaggtgaaaaagctggcggttttgccccgtattatggagatgaaccaatggatttcaaaatcaacaccgatgagattatgacttcactcaagtctgttaatggacaaatagaaagcctcattagtcctgatggttctcgtaaaaaccccgctagaaactgcagagacctgaaattctgccatcctgaactcaagagtggagaatactgggttgaccctaaccaaggatgcaaattggatgctatcaaggtattctgtaatatggaaactggggaaacatgcataagtgccaatcctttgaatgttccacggaaacactggtggacagattctagtgctgagaagaaacacgtttggtttggagagtccatggatggtggttttcagtttagctacggcaatcctgaacttcctgaagatgtccttgatgtgcagctggcattccttcgacttctctccagccgagcntcccagaacatcacatatcactgcaaaatagcatt

SEQ ID NO: 4180 - DNA, 159 bp, Homo sapiens
actatctggtttgagagtgcccttgaaaatttcatactgcttagagtttcctttatttccgaacaaagaaactagtatgtgtcctgtaaccttttttccagacagtgtgacagataccttatacctccaacgcgcaaaattactggcatcaccagtgtc

SEQ ID NO: 4181 - DNA, 269 bp, Homo sapiens
gaaactccttgtgctagctgtgctgctcacagtggccgccgccgacagcagcatcagccctcgggccgtgtggcagttccgcaaaatgatcaagtgcgtgatcccggggagtgaccccttcttggaatacaacaactacggctgctactgtggcttggggggctcaggcacccccgtggatgaactggacaagtgctgccagacacatgacaactgctatgaccaggccaagaagctggacagctgtaaatttctgctggacaacccgt

SEQ ID NO: 4182 - DNA, 286 bp, Homo sapiens
actcattccaatgaatttgactcagatgtggatgttggggacttgcagatggttaaatttatttggtataacaatgtgatcaacccaactttacctagagtgggagcatccaagattatagtggagacaaatgttggaaaacagttcaacttctgtagtccagaaaccgtcagggaggaagttctgctcaccctcacaccgtgttaggagactactgttatttgaccaatgaattgacttctaataaaatctagtggtgatgcattaaaaaaaaaaaaaaaaaaaa

SEQ ID NO: 4183 - DNA, 450 bp, Homo sapiens
acctcttcccatgactgcacccagctccaggggcccttgggacagccagagctgggtggggacagtgataggcccaaggtcccctccacatcccagcagcccaagcttaatagccctccccctcaacctcaccattgtgaagcacttactatgtgctgggtgcctcccacacttgctggggctcacggggcctccaacccatttaatcaccatgggaaactgttgtgggcgctgcttccaggataaggagactgaggcttagagagaggaggcagccccctccacaccagtggcctcgtggttattagcaaggctgggtaatgtgaaggcccaagagcagagtctgggcctctgactctgagtccactgctccatttataaccccagcctgacctgagactgtcggagaggctgtctggggcctttatcaaaaaaagactcagccaagac

SEQ ID NO: 4184 - DNA, 271 bp, Homo sapiens
  misc_feature 239, 241: n = A,T,C or G
cacattttaattttcctctaattaaaatgtgcagtattttcagtgtcaaatatatttaactatttagagaatgatttccacctttatgttttaatatcctaggcatctgctgtaataatattttagaaaatgtttggaatttaagaaataacttgtgttactaatttgtataacccatatctgtgcaatggaatataaatatcacaaagttgtttaaaaaaaaaaaaaaaaaaaaaaantnaaaaaaaaaaaaaaaaaaaaaaaagcttgt

SEQ ID NO: 4185 - DNA, 478 bp, Homo sapiens
caggaaaagaagtttgctacgaaagactcggctgcttcagtgatgactccccatggtcaggaattacggaaagacccctccatatattgccttggtctccaaaagatgtcaacacccgcttcctcctatatactaatgagaacccaaacaactttcaagaagttgccgcagattcatcaagcatcagtggctccaatttcaaaacaaatagaaaaactcgctttattattcatggattcatagacaagggagaagaaaactggctggccaatgtgtgcaagaatctgttcaaggtggaaagtgtgaactgtatctgtgtggactggaaaggtggctcccgaactggatacacacaagcctcgcagaacatcaggatcgtgggagcagaagtggcatattttgttgaatttcttcagtcggcgttcggttactcaccttccaacgtgcatgtcattggccacagcctgggtgcccacgc

SEQ ID NO: 4186 - DNA, 214 bp, Homo sapiens
  misc_feature 57: n = A,T,C or G
acacatatggcccgggagctacaacaatctatcctgctgctgggggctctgacgacntgggcttatgaccaaggaatcagatattccttcacctttgaacttcgagatacaggcagatatggctttctccttccagaatcccagatccgggctacctgcgaggagaccttcctggcaatcaagtatgttgccagctacgtcctggaacacctgt

SEQ ID NO: 4187 - DNA, 555 bp, Homo sapiens
  misc_feature 496: n = A,T,C or G
tttcaaaacaaatagaaaaactcgctttattattcatggattcatagacaagggagaagaaaactggctggccaatgtgtgcaagaatctgttcaaggtggaaagtgtgaactgtatctgtgtggactggaaaggtggctcccgaactggatacacacaagcctcgcagaacatcaggatcgtgggagcagaagtggcatattttgttgaatttcttcagtcggcgttcggttactcaccttccaacgtgcatgtcattggccacagcctgggtgcccacgctgctggggaggctggaaggagaaccaatgggaccattggacgcatcacagggttggacccagcagaaccttgctttcagggcacacctgaattagtccgattggaccccagcgatgccaaatttgtggatgtaattcacacggatggtgcccccatagtccccaatttggggtttggaatgagccaagtcgtgggccacctagatttctttccnaatggaggagtggaaatgcctggatgtaaaaagaacattctctctcagattgtggacat

SEQ ID NO: 4188 - DNA, 204 bp, Homo sapiens
  misc_feature 79, 161: n = A,T,C or G
acacatatggcccgggagctacaacaatctatcctgctgctgggggctctgacgactgggcttatgaccaaggaatcanatattccttcacctttgaacttcgagatacaggcagatatggctttctccttccagaatcccagatccgggctacctgcgangagaccttcctggcaatcaagtatgttgccagctacgtcctgg

SEQ ID NO: 4189 - DNA, 287 bp, Homo sapiens
actcattccaatgaatttgactcagatgtggatgttggggacttgcagatggttaaatttatttggtataacaatgtgatcaacccaactttacctagagtgggagcatccaagattatagtggagacaaatgttggaaaacagttcaacttctgtagtccagaaaccgtcagggaggaagttctgctcaccctcacaccgtgttaggagactactgttatttgaccaatgaattgacttctaataaaatctagtggtgatgcaaaaaaaaaaaaaaaaaagcttgt

SEQ ID NO: 4190 - DNA, 190 bp, Homo sapiens
ggcactcttggttctggtgactgtggccctggcatctgctcatcatggtggtgagcactttgaaggcgagaaggtgttccgtgttaacgttgaagatgaaaatcacattaacataatccgcgagttggccagcacgacccagattgacttctggaagccagattctgtcacacaaatcaaacctcacagt

SEQ ID NO: 4191 - DNA, 418 bp, Homo sapiens
acttcatgctgtctacactaagagagaatgagagacacactgaagaagcaccaatcatgaattagttttatatgcttctgttttataattttgtgaagcaaaattttttctctaggaaatatttattttaataatgtttcaaacatatataacaatgctgtattttaaaagaatgattatgaattacatttgtataaaataatttttatatttgaaatattgactttttatggcactagtatttttatgaaatattatgttaaaactgggacaggggagaacctaggatgatattaaccaggggccatgaatcaccttttggtctggagggaagccttggggctgatgcagttgttgcccacagctgtatgattcccagccagcacagcctcttagatgcagttctgaagaagatggt

SEQ ID NO: 4192 - DNA, 284 bp, Homo sapiens
ggtgtcgtgaaaactacccctaaaagccaaaatgggaaaggaaaagactcatatcaacattgtcgccattggacacgtagattcgggcaagtccaccactactggccatctgatctataaatgcggtggcatcgacaaaagaaccattgaaaaatttgagaaggaggctgctgagatgggaaagggctccttcaagtatgcctgggtcttggataaactgaaagctgagcgtgaacgtggtatcaccattgatatctccttgtggaaatttgagaccagcaagt

SEQ ID NO: 4193 - DNA, 501 bp, Homo sapiens
acaaacaagcccagagtgtgaagactacaataaacacctaactcttcaatgcccagacattgatgaacgcccacaaacatcaaaaacagccagcaaactacgacctcaccaaatgaattaaataaggcaccagagactaatcccagagaagcagatgtgtgacctttcagacaaagaattcaaaataactgtgttgaggaaagtcagagaaattcaaggtaacacagagaagggattcagaatcttattagataaatttgacaaataattaaaaagaatccagcagaaattctagagttgaaaaatccaagtgacatagtgaagaatgcatcagagtctcttaacagcaaaattgttcaagcagaagaaagaattaatgagcttgaagacagactgtttgaaaatacatagaggagacaaaagaaaaaaggaatgaaaaagaacgaagcatgcctacaagatctagaaaatagcctcaaaagggcaaatctaatagttact

SEQ ID NO: 4194 - DNA, 213 bp, Homo sapiens; identical to SEQ ID NO: 3148

SEQ ID NO: 4195 - DNA, 560 bp, Homo sapiens
  misc_feature 35, 364, 377, 534, 538: n = A,T,C or G
gcaagcttttttttttttttttttttttttttggngatcagggtaggtaaagtatttttattataaatttcaagatctaaaaaataatttattacatttactaagataaacctaagatgacctttttaaaccaagccacgtgtgccctgcatagtgacgtcgtggccctcgggcatggaaagacacgggtctgcccttcctttagggctggaaagacacgggtctacccttcctttagggctggaaagacacgggtctacccttcctttagggctgggatcagccagaggaaagaaaattatgccgatgctcaactagcatatactgattaggactattttggtttattaccctggcattgaanaattcaggtgaanatgccaccactcttgaactctgaaagccaaactagaatctgcagagcagcctcagtcttaaaattcaagcttctttttcctactttttatttcagtgatatttaggacactctctatttcataagaattatgatctaactggctctataagcccaanaatnaaaatccttaccccctagcaag

SEQ ID NO: 4196 - DNA, 220 bp, Homo sapiens
  misc_feature 165, 190, 192: n = A,T,C or G
acctatggacgtgagatccaagtggcagagcttctcaacaagttagacttttatgtcctgcctgtgctcaatattgatggctacatctacacctggaccaagagccgattttggagaaagactcgctccacccatactggatctagctgcattggcacagacccnaacagaaattttgatgctggttggngngaaattggagcctctcgaaacctctgtg

SEQ ID NO: 4197 - DNA, 412 bp, Homo sapiens
  misc_feature 373, 386, 397: n = A,T,C or G
actgaagatcagcgatgcaaactcattagggaggagatggtctgaactgagttggaggcatagtctagtttaatttttgacttcatagtaattgcaggaccagttctagacatccatttttcagcttcctctagtttttgaacttgcaaacaagggagaacttcttctcacaagattcatccttccatttcttgaatcctgagcatgaagtcaggcttgcacagtagccagcattagcactgctcggggatccagtgtcccaggacttgtaggagaccagggacccactactccagtgccagcggcggttcttttttgggtcatggaggccaatccagacattgctgtcatcagtgctactctccttaatcantgaggccacgaangcaccctccgnctgggtgagcacaga

SEQ ID NO: 4198 - DNA, 285 bp, Homo sapiens
acagagtcttttgcttcctcccacccctagggggaaaaactgctttgtgctttgggaagttgtctctgaaacctggggacagaggacgcaggacagactaggagggagccgggaggatgggctgcagctgtggaggagggtttcagaggagagaggtcggagagcagaggcctgagaagccagaggcaggtggagagagggtggaaagtgagcagcgggctgggctggagccgcacacgctctcctcccatgttaaatagcacctttagaaaaattcacaagtcc

SEQ ID NO: 4199 - DNA, 560 bp, Homo sapiens; identical to SEQ ID NO: 4134

SEQ ID NO: 4200 - DNA, 388 bp, Homo sapiens
acactgtcttcacacagagcattctttctcaccttaactgcagctgtgcaagatgcctcagtgtgatgcaaagactctatattggaaaaattacaacttggtctaaaaacttattggtgttgatatttttaatccaaaataaatttataaaaaaatcctttaatggactatttcagtttaatatacagtaatacactgtagataaagttaatattccccccactaatttaatagggattgatatcaatgtttctgatcactggagaaataaaaactaatgtggacctttgatatccatggcataggaggattcccacagtttatcctaagaggatctggggaatattaaatattctaatacagtgtcttagcaatatgaattttaagt

SEQ ID NO: 4201 - DNA, 481 bp, Homo sapiens
  misc_feature 418: n = A,T,C or G
accactataatctctaatacttactcagaattactgtgtatttacttaatttcttattatgtgccttattatgtgcttaagatacaataggttagagtttaatctaaatatcttgaaagctatattgtgggcttggtaagcattttgttttttctttctctgttttggtaaggatttaaaatttttttcattgcaattttaagtggttttcaataagtaatagtttttatcaaatttttggtgcttggtgcagagacggtgtggggaagggtgaatggttttgggaataattcagtgcacacctgtaggcctctttacattgtgactgataggggttattgcatatcaatttggggctgtagagtgcaatctcagtttcatcttcttcacccatcagaatttgtctcaggattacttngtttttctcagtcctcaagcgagaacttgcttttctttgttaatgtgactttcattactgagt

SEQ ID NO: 4202 - DNA, 331 bp, Homo sapiens
acctatggacgtgagatccaagtgacagagcttctcgacaagttagacttttatgtcctgcctgtactcaatattgatggctacatctacacctggaccaagagccgattttggagaaagactcgctccacccatactggatctagctgcattggcacagaccccaacagaaattttgatgctggttggtgtgaaattggagcctctcgaaacccctgtgatgaaacttactgtggacctgccgcagagtctgaaaaggagaccaaggccctggctgatttcatccgcaacaaactctcttccatcaaggcatatctgacaatccactcgt

SEQ ID NO: 4203 - DNA, 285 bp, Homo sapiens
  misc_feature 225, 245: n = A,T,C or G
acattcaccacatacacaagtccctctgttactgcagattttgccatctggagacgtgcatcttcgcttgctttcccagggggtgatatcgcactggaattcacatttatctccatgccaaccagccttgcagtagcagtttccacagtaacacttcccatggcctccacatatttcttctgtttcatcgtctatgcattctctatcgtcacactcacaaaattnaccatacacaagtccacttncatctgaattatcacacttacacctgccacagtgacatgt

SEQ ID NO: 4204 - DNA, 551 bp, Homo sapiens
acattaagactaaagttatggattgttcctgtttggcatagaaatgtgatgactattaacagaaaggggaaaaagatttgccccctatccatcatcagacagacagacttctcttactaaaccccttatgtggagtgggatgagtgactatttcctgcagaaagatcatgcaacttaaagcaaaaaaacaaaccaaccaacaaaaaaaacaaaaacaaaaacaaacttgtgcatattacacatgactgattattgggtgtgcctggcaagactaaatgctgattcttttcagcgtttgaattaaaagaattccatatacagcagatagataacagtaacaaatattgaactaaaatcgctggcaacattatatatttaaggttccatcataaactcctcattattctctatgtattctgttacagcttctagcatgcttcatcgtgacaacctattatcaagcctcatattttcacaggattatatacttattagatgtttgtttctagaaattatactacatatgtgttactaggcatatttaaaataag

SEQ ID NO: 4205 - DNA, 376 bp, Homo sapiens; identical to SEQ ID NO: 3915

SEQ ID NO: 4206 - DNA, 567 bp, Homo sapiens
  misc_feature 180, 181, 402, 555: n = A,T,C or G
ttctgatccttacctttgttgcagctgctgttgctgccccctttgatgatgatgacaagatcgttgggggctacatctgtgaggagaattctgtcccctaccaggtgtccttgaattctggctaccacttctgcggtggctccctcatcagcgaacagtgggtggtgtcagcaggtcacnngctacaagtcccgcatccaggtgagactgggagagcacaacatcgaagtcctggaggggaatgaacagttcatcaatgcagccaagatcatccgccaccccaaatacaacagccggactctggacaatgacatcctgctgatcaagctctcctcacctgctgtcatcaattcccgcgtgtccgccatctctctgcccactgcccctccagctgctggcacngagtccctcatctccggctggggcaacactctgagttctggtgccgactacccagacgagctgcagtgcctggatgctcctgtgctgagccaggctgagtgtgaagcctcctaccctggaaagattaccaacaacatgttctgtgtgggcttnctcgagggaggc

SEQ ID NO: 4207 - DNA, 188 bp, Homo sapiens
acactcaaactttatttggttgcctggatggggccagagaggaggacaagaagggtgtcaaagggtcagctcagtaggggtgattcagggtgtgctccatgatggtcagaagcgccagccacgtctccttggctgtggggatgatctgggaggctggcagcaggaagccatagcgcccagtgtcccgg

SEQ ID NO: 4208 - DNA, 534 bp, Homo sapiens
gaactgccacgatgctgccactttggactctttcactgctgctgggagcagtagcaggaaaagaagtttgctacgaaagactcggctgcttcagtgatgactccccatggtcaggaattacggaaagacccctccatatattgccttggtctccaaaagatgtcaacacccgcttcctcctatatactaatgagaacccaaacaactttcaagaagttgccgcagattcatcaagcatcagtggctccaatttcaaaacaaatagaaaaactcgctttattattcatggattcatagacaagggagaagaaaactggctggccaatgtgtgcaagaatctgttcaaggtggaaagtgtgaactgtatctgtgtggactggaaaggtggctcccgaactggatacacacaagcctcgcagaacatcaggatcgtgggagcagaagtggcatattttgttgaatttcttcagtcggcgttcggttacccaccttccacgtgcatgtcattggccacagcctgggtgcccacgctgc

SEQ ID NO: 4209 - DNA, 541 bp, Homo sapiens
actatctggtttgagagtgcccttgaaaatttcatactgcttagagtttcctttatttccgaacaaagaaactagtatgtgtcctgtaaccttttttccagacagtgtgacagataccttatacctccaacgtgcaaaattactggcatcaccagtgtctagataaaatttctggcccacatcatttgttttcccaggatatctatcagcatagtgacccacctgtgggcagcctccacttggacaagggaaacacttgtttgcagtgaagacgttgtaagaggcacaggggaatccagcaaagccatcagggttgacgatgctatcagtgtaatatttgtagcttcttaagtgattacaggccgcaaagtctcgagtcccttcccagattccgtctatgtccacaatctgagagagaatgttctttttacatccaggcatttccactcctccatttggaaagaaatctaggtggcccacgacttggctcattccaaaccccaaattggggactatgggggcaccatccgtgtgaattaca

SEQ ID NO: 4210 - DNA, 543 bp, Homo sapiens
actatctggtttgagagtgcccttgaaaatttcatactgcttagagtttcctttatttccgaacaaagaaactagtatgtgtcctgtaaccttttttccagacagtgtgacagataccttatacctccaacgtgcaaaattactggcatcaccagtgtctagataaaatttctggcccacatcatttgttttcccaggatatctatcagcatagtgacccatctgtgggcagcctccacttggacaagggaaacacttgtttgcagtgaagacgttgtaagaggcacaggggaatccaacaaagccatcagggttgacgatgctatcagtgtaatatttgtagcttcttaagtgattacaggccgcaaagtctcgagtcccttcccagattccgtctatgtccacaatctgagagagaatgttctttttacatccaggcatttccactcctccatttggaaagaaatctaggtggcccacgacttggctcattccaaaccccaaattggggactatgggggcaccatccgtgtgaattacatc

SEQ ID NO: 4211 - DNA, 308 bp, Homo sapiens
acagggcgtcagcaggatcctggcccactgggcctgctacaaggtgcaacagaaggatgtctcagatgaggatgtggctcgagccattaaccagaagctgggggacacgcctggtgtctcttactccgacattgctgcacgagcctatggttgtggccgcacggagctggccatcaaggtgtgggtgcccagccctccacagacactctgatgtggttgttcagggcccccatgccagctccttctctctgtgccttccttctcacctcacagctgctggagtatgagccacgctcaggggagcaggt

SEQ ID NO: 4212 - DNA, 50 bp, Homo sapiens
acccattcactttctcttttccagaaagtgtgactgataccttatatctc

SEQ ID NO: 4213 - DNA, 528 bp, Homo sapiens
actgataactaaaggctacagagatttcatatattttttttaacttttagaaatcagagtgcttataaaatggctggctcatggctctgtcacccagcacctctgacgccgcctcctagccttcgttggtgagataaccaggaatagtgattccatgcgtaaacaacaagaatactaaaccaataaaactagcttatcatgcaaatattaaggcatctagaaagtcagttaaaatatattgtcatagagacagaacatctatttcccagcggacttcatgtaacaaaggctacgttgcaggggctgcgatctaccatcagtgaaatatcatcgaccctttttatgtcattacagtttcaaccttaagggaattagtgattgtaagtgctgcaattgctggtctattatcttctttcttcagtttctttcctttctgcctttgtgttgttttgtccagtcttcctcttttcctttttttttatttaaaaaaaaaatttcttaaactattgttgtgtttctttttccctc

SEQ ID NO: 4214 - DNA, 472 bp, Homo sapiens
actttcaaaataatatgacatcttaattgtggttcttgtgcattcttttgaagacaatatttgcttattcatgtagtgagtgacagacaagattctagagtatgatgattattaattcgtgcatgatgaaaaatattagatattattggcagctgattagtcagttttcacaggtattagattatcacatgttcaatgaggaactacattaatgataactaaggtagaaaattcagaataacacttaaacacttaatgacaaaaatcttacaccaatacagttaatttgagaatcactgcaataacatgttcaaaaaatccatgattagtgcattaacctcaccgatgactgaataagacttattcaatgatggaaacggaaatgttattgtaaattccctggctttactgcatttccttgtatttcacaactctcacactcagtttctgtttttctgtgttagtgaagtct

SEQ ID NO: 4215 - DNA, 297 bp, Homo sapiens
  misc_feature 265, 297: n = A,T,C or G
actcattccaatgaatttgactcagatgtggatgttggggacttgcagatggttaaatttatttggtataacaatgtgatcaacccaactttacctagagtgggagcatccaagattatagtggagacaaatgttggaaaacagttcaacttctgtagtccagaaaccgtcagggaggaagttctgctcaccctcacaccgtgttaggagactactgttatttgaccaatgaattgacttctaataaaatctagtggtgatgcanaaaaaaaaaaaaaaaaaaaaaaaaaaaaaaan

SEQ ID NO: 4216 - DNA, 286 bp, Homo sapiens
actcattccaatgaatttgactcagatgtggatgttggggacttgcagatggttaaatttatttggtataacaatgtgatcaacccaactttacctagagtgggagcatccaagattatagtggagacaaatgttggaaaacagttcaacttctgtagtccagaaaccgtcagggaggaagttctgctcaccctcacaccgtgttaggagactactgttatttgaccgatgaattgacttctaataaaatctagtggtgatgcaaaaaaaaaaaaaaaaaaaaaag

SEQ ID NO: 4217 - DNA, 331 bp, Homo sapiens
  misc_feature 229, 230: n = A,T,C or G
acctatggacgtgagatccaagtgacagggcttctcgacaagttagacttttatgtcctgcctgtgctcaatattgatggctacatctacacctggaccaagagccgattttggagaaagactcgctccacccatactggatctagctgcattggcacagaccccaacagaaattttgatgctggttggtgtgaaattggagcctctcgaaacccctgtgatgaaactnnctgtggacctgccgcagagtctgaaaaggagaccaaggccctggctgatttcatccgcaacaaactctcttccaccaaggcatatctgacaatccactcgt

SEQ ID NO: 4218 - DNA, 336 bp, Homo sapiens
ccgagcaggtgatccccatcaactctgaggagctgtttgtgcatccactctggaaccgctcgtgtgtggcctgtggcaatgacatcgccctcatcaagctctcacgcagcgcccagctgggagatgccgtctagctcgcctcactccctcccgctggtgacatccttcccaacaagacaccctgctacatcaccggctggggccgtctctataccaatgggccactcccagacaagctgcagcaggcccggctgcccgtggtggactataagcactgctccaggtggaactggtggggttccaccgtgaagaaaaccatggtgtgtgctggagggt

SEQ ID NO: 4219 - DNA, 405 bp, Homo sapiens
gtggacatagacggaatctgggaagggactcgagactttgcggcctgtaatcacttaagaagctacaaatattacactgatagcatcgtcaaccctgatggctttgctggattcccctgtgcctcttacaacgtcttcactgcaaacaagtgtttcccttgtccaagtggaggctgcccacagatgggtcactatgctgatagatatcctgggaaaacaaatgatgtgggccagaaattttatctagacactggtgatgccagtaattttgcacgttggaggtataaggtatctgtcacactgtctggaaaaaaggttacaggacacatactagtttctttgttcggaaataaaggaaactctaagcagtatgaaattttcaagggcactctcaaaccagatagt

SEQ ID NO: 4220 - DNA, 164 bp, Homo sapiens
actatctggtttgagagtgcccttgaaaatttcatactgcttagagtttcctttatttccgaacaaagaaactagtatgtgtcctgtaaccttttttccagacagtgtgacagataccttatacctccaacgtgcaaaattactggcatcaccagtgtctagat

SEQ ID NO: 4221 - DNA, 560 bp, Homo sapiens
actcccagccacctgggaggctgaggtgggaggatcacctgagcctggggacgtcaaagctccagtgagctgggatcacgccactgcactccagcctggcaacacagtgagacccccatctcaaaaaaaaaaaaaaatgctgtaggtgaaagaaccatgcaacacttcaaagattgataaaatatttacaaaatgctctcatttttaaacttataaggcatactgaagtagtgtatcaggcaagtgaaagcttcactagaagaaggaaagactagaatttaaaaaatgttttaacccataaggtcatcctggacttaccccaaggacaagaatgtcacactgtctttatccaagtctcaaaggtaaatatcacaattatttacttagatccctttaaaagtgatcatttctttttttttcttttttcataaataattacaagaacaagcaaataatttctccttttattgctgaggctaaagaaaagcagtaaaattttattgggaaacatttgagcttttcattacatatttgcaattgctatgtatgtgcacataggt

SEQ ID NO: 4222 - DNA, 300 bp, Homo sapiens
  misc_feature 271: n = A,T,C or G
actcattccaatgaatttgactcagatgtggatgttggggacttgcagatggttaaatttatttggtataacaatgtgatcaacccaactttacctagagtgggagcatccaagattatagtggaggcaaatgttggaaaacagttcaacttctgtagtccagaaactgtcagggaggaagttctgctcaccctcacaccgtgttaggagactactgttatttgaccaatgaattgacttctaataaaatctagtggtgatgcatcaaaanaaaaaaaaaaaaaaaaaaaaaaagcttgt

SEQ ID NO: 4223 - DNA, 331 bp, Homo sapiens; identical to SEQ ID NO: 3099

SEQ ID NO: 4224 - DNA, 351 bp, Homo sapiens
  misc_feature 272, 348: n = A,T,C or G
agcttttttttttttttttttttttttttttttgcaggcctgtgtgtcactttcaggcccttcctcatttattcataatatgtgtagccacgaggtagcatttcctttggcatcctggaaaaacatgtctcacttagggttggacctgttagttaatagttctgcagcttctggtatttgtaagtctgcccgttgatttacaaaatgcctcactgtgattgtcgctacagtcaccacattcagagctagaaccatgaaggaaaacagatgcncactgttgaaaggctggtttggagtttcttccgcatgtgtttcatgctgaaatcctgaattgccacttgcacttcnatc

SEQ ID NO: 4225 - DNA, 249 bp, Homo sapiens
gccagcactcagctgactctaagaccagaagaaaaccgggaacatttagacaaatgttttttaaagcatataaccaaattatataattgaatgaaaactgaattacacagtttgaaaactttccagaaaaatgcacacaggttttttttctaggagtttttacagtttcttcatcctaccattaactgattcccttactttaggacaatcctttttcatgttatagttgtacctcggccggaccacgct

SEQ ID NO: 4226 - DNA, 331 bp, Homo sapiens; identical to SEQ ID NO: 3099

SEQ ID NO: 4227 - DNA, 343 bp, Homo sapiens
  misc_feature 329, 331, 333: n = A,T,C or G
acattagcaccataacatgcgtctttaaagccttcccaaatattagtaatcttgaccagcaatgacaagaaaaaagaggagcacctttacaagcagttgatatccaatattaaaataattgtggctttaaaaatatttctttaaattcttgcattacacttttctttttaaaccaatcttccaggagattaatcaatgaaatttataagttttatcaacgtataaaatttttttcatcttctgggactcatagaatacaatctgtgtttctgaccagttgaggtagttaaaatagggagggcttttctaatttcgtatttgactatttnananagaaaggtta

SEQ ID NO: 4228 - DNA, 279 bp, Homo sapiens
actcattccaatgaatttgactcagatgtggatgttggggacttgcagatggttaaatttatttggtataacaatgtgatcaacccaactttacctagagtgggagcatccaagattatagtggagacaaatgttggaaaacagttcaacttctgtagtccggaaaccgtcagggaggaagttctgctcaccctcacaccgtgttaggagactactgttatttgaccaatgaattgacttctaataaaatctagtggtgatgcattaaaaaaaaaaaaa

SEQ ID NO: 4229 - DNA, 467 bp, Homo sapiens
  misc_feature 398: n = A,T,C or G
ctttcaagaagttgccgcagattcatcaagcatcagtggctccaatttcaaaacaaatagaaaaactcgctttattattcatggattcatagacaagggagaagaaaactggctggccaatgtgtgcaagaatctgttcaaggtggaaagtgtgaactgtatctgtgtggactggaaaggtggctcccgaactggatacacacaagcctcgcagaacatcaggatcgtgggagcagaggtggcatattttgttgaatttcttcagtcggcgttcggttactcaccttccaacgtgcatgtcattggccacagcctgggtgcccacgctgctggggaggctggaaggagaaccaatgggaccattggacgcatcacagggttggacccagcagaacctngctttcagggcacacctgaattagtccgattggaccccagcgatgccaaatttgtggatgtaattcaca

SEQ ID NO: 4230 - DNA, 532 bp, Homo sapiens
ggagaaccaatgggaccattggacgcatcacagggttggacccagcagaaccttgctttcagggcacacctgaattagtccgattggaccccagcgatgccaaatttgtggatgtaattcacacggatggtgcccccatagtccccaatttggggtttggaatgagccaagtcgtgggccacctagatttctttccaaatggaggagtggaaatgcctggatgtaaaaagaacattctctctcagattgtggacatagacggaatctgggaagggactcgagactttgcggcctgtaatcacttaagaagctacaaatattacactgatagcatcgtcaaccctgatggctttgctggattcccctgtgcctcttacaacgtcttcactgcaaacaagtgtttcccttgtccaagtggaggctgcccacagatgggtcactatgctgatagatatcctgggaaaacaaatgatgtgggccagaaattttatctagacactggtgatgccagtaattttgcacgttggaggta

SEQ ID NO: 4231 - DNA, 166 bp, Homo sapiens
acagcattgactggcacaactgcccatagtgagcttcccaactaactgccttcagtggattcgggcaagtgcaaagtctttggcctattgtgtgacaaagaggtatatattaaaggaaaagaaaaatgacatgaataagaaaattccgtcaacaaggttggagtag

SEQ ID NO: 4232 - DNA, 514 bp, Homo sapiens
  misc_feature 185, 476: n = A,T,C or G
acaaagattggtagcttttatatttttttaaaaatgctatactaagagaaaaaacaaaagaccacaacaatattccaaattataggttgagagaatgtgactatgaagaaagtattctaaccaactaaaaaaaatattgaaaccacttttgattgaagcaaaatgaataatgctagatttaaaancagtgtgaaatcacactttggtctgtaaacatatttagctttgcttttcattcagatgtatacataaacttatttaaaatgtcatttaagtgaaccattccaaggcataataaaaaaagaggtagcaaatgaaaattaaagcatttattttggtagttcttcaataatgatgcgagaaactgaattccatccagtagaagcatctccttttgggtaatctgaacaagtgccaacccagatagcaacatccactaatccagcaccaattccttcacaaagtccttccacagnagaagtgcgatgaatattaattgttgaattcatttcag

SEQ ID NO: 4233 - DNA, 523 bp, Homo sapiens
gacggaactgccacgatgctgccactttggactctttcactgctgctgggagcagtagcaggaaaagaagtttgctacgaaagactcggctgcttcagtgatgactccccatggtcaggaattacggaaagacccctccatatattgccttggtctccaaaagatgtcaacacccgcttcctcctatatactaatgagaacccaaacaactttcaagaagttgccgcagattcatcaagcatcagtggctccaatttcaaaacaaatagaaaaactcgctttattattcatggattcatagacaagggagaagaaaactggctggccaatgtgtgcaagaatctgttcaaggtggaaagtgtgaactgtatctgtgtggactggaaaggtggctcccgaactggatacacacaagcctcgcagaacatcaggatcgtgggagcagaagtggcatattttgttgaatttcttcagtcggcgttcggttactcaccttccaacgtgcatgtcattggccacagcc

SEQ ID NO: 4234 - DNA, 151 bp, Homo sapiens
acctaccctacctcaaaggaattctgaaaaaagtaagtgaatttgtataaagcaaagcactcacaatatgcctgacacacaaactgcttaataaatgttagtaatttttaaaacctcctcataagcggcttagaaattattcatgtttggt

SEQ ID NO: 4235 - DNA, 291 bp, Homo sapiens
  misc_feature 151, 168, 200, 217, 243, 246: n = A,T,C or G
acaagctttttttttttttttttttttttttttaaattttctgagagatctttattctttattcaggatgtgggatcgatcagcactgccagctgggccttggttctagtggcttgctatggtctcctcaatccagtcgatgaaggcgganactcgagtgaacaccgngggcttcctgcgggtgttgcagccaaaggcanaaacaaagctggtcacnccatggacctgccagccaccatcctntgnggggcagttgaggggtcctccaaagtcaccgttgcagccggagcg

SEQ ID NO: 4236 - DNA, 269 bp, Homo sapiens
aaaactcatgatgctccggctgctcagttccctcctccttgtggccgttgcctcaggctatggcccaccttcctctcgcccttccagccgcgttgtcaatggtgaggatgcggtcccctacagctggccctggcaggtttccctgcagtatgagaaaagtggaagcttctaccacacgtgtggcggtagcctcatcgcccccgactgggttgtgactgccggccactgcatctcgagctcctggacctaccaggtggtgttgggtgagt

SEQ ID NO: 4237 - DNA, 673 bp, Homo sapiens
  misc_feature 575, 601: n = A,T,C or G
acttcatccaaaataagaagaaaataacagaatctagcactttcatattttaaagctgatattttagcaatattttgataaaactttattccatttgtaatttttggctacacaacactaaaagaaaatttatttattggcatgcaaagcaatgtggcctcagaatacacctcttaaatttacaggacttaacatttcaaacatcccacgtggctagcaggtgatgttgtgaagatgatcttgaatagtgatatagttatttcctgtcagtgattttggtctgaatcaaccagtttataaagtccctggcggcaagattatcaagaatggtgttcatctcatcagagaaagaaccatcagcatgtctgcggccaagttcttcaacaatggcgacctcttctgggaaatctcgccttcctcggcctttcaccagccaagcaatgaattccttggcagcttggccttccaaataagaacttacatcactggtaaaggtcccttcagcatgtctctcaaattcatcgtgacgtttggcaatgttattcctgttcctcttggtattcatcaaccactgnacaaaatcttgggcacgcctggagtncagatacttgctgtagtcactggtgaatgtgccctgtgaatggcgcttgtcctcgttcatctgatcaggatc

SEQ ID NO: 4238 - DNA, 539 bp, Homo sapiens
  misc_feature 500: n = A,T,C or G
gacggaactgccacgatgctgccactttggactctttcactgctgctgggagcagtagcaggaaaagaagtttgctacgaaagactcggctgcttcagtgatgactccccatggtcaggaattacggaaagacccctccatatattgccttggtctccaaaagatgtcaacacccgcttcctcctatatactaatgagaacccaaacaactttcaagaagttgccgcagattcatcaagcatcagtggctccaatttcaaaacaaatagaaaaactcgctttattattcatggattcatagacaagggagaagaaaactggctggccaatgtgtgcaagaatctgttcaaggtggaaagtgtgaactgtatctgtgtggactggaaaggtggctcccgaactggatacacacaagcctcgcagaacatcaggatcgtgggagcagaagtggcatattttgttgaatttcttcagtcggcgttcggttactcaccttccancgtgcatgtcattggccacagcctgggtgcccacgctgc

SEQ ID NO: 4239 - DNA, 543 bp, Homo sapiens
actatctggtttgagagtgcccttgaaaatttcatactgcttagagtttcctttatttccgaacaaagaaactagtatgtgtcctgtaaccttttttccagacagtgtgacagataccctatacctccaacgtgcaaaattactggcatcaccagtgtctagataaaatttctggcccacatcatttgttttcccaggatatctatcagcatagtgacccatctgtgggcagcctccacttggacaagggaaacacttgtttgcagtgaagacgttgtaagaggcacaggggaatccagcaaagccatcagggttgacgatgctatcagtgtaatatttgtagcttcttaagtgattacaggccgcaaagtctcgagtcccttcccagattccgtctatgtccacaatctgagagagaatgttctttttacatccaggcatttccactcctccatttggaaagaaatctaggtggcccacgacttggctcattccaaaccccaaattggggactatgggggcaccatccgtgtgaattacatc

SEQ ID NO: 4240 - DNA, 470 bp, Homo sapiens
acctgtggaagttacttcaaccctggaagtagggactttccagcagtcccatattctggatgggatttcaatgatggtaaatgtaaaactggaagtggagatatcgagaactacaatgatgctactcaggtcagagattgtcgtctgactggtcttcttgatcttgcactggagaaggattacgtgcgttctaagattgccgaatatatgaaccatctcattgacattggtgttgcagggttcagacttgatgcttccaagcacatgtggcctggagacataaaggcaattttggacaaactgcataatctaaacagtaactggttccctgcaggaagtaaacctttcatttaccaggaggtaattgatctgggtggtgagccaattaaaagcagtgactactttggtaatggccgggtgacagaattcaagtatggtgcaaaactcggcacagttattcgcaagtggaa

SEQ ID NO: 4241 - DNA, 200 bp, Homo sapiens
actgtgaggtttgatttgtgtgacagaatctggcttccagaagtcaatctgggtcgtgctggccaactcgcggattatgttaatgtgattttcatcttcaacgttaacacggaacaccttctcgccttcaaagtgctcaccaccatgatgagcagatgccagggccacagtcaccagaaccaagagtgccaacattgtgt

SEQ ID NO: 4242 - DNA, 411 bp, Homo sapiens
acgccaaggccgccgacatcgactatatagcaggcaccaacaacatggacggccacatcttcgccagcatcgacaagcctgccatcaacaagggcaacaagaaagtcacggaggaggacttctacaagctggtcagtgagttcacaatcaccaaggggctcagaggcgccaagacgacctttgatgtctacactgagtcctgggcccaggacccatcccaggagaataagaagaagactgtggtggactttgagaccgatgtcctcttcctggtgcccaccgagattgccctagcccagcacagagccaatgccaagagtgccaagacctacgcctacctgttttcccatccctctcggatgcccgtctaccccaaatgggtgggggccgaccatgcagatgacattcagt

SEQ ID NO: 4243 - DNA, 332 bp, Homo sapiens
  misc_feature 36, 46, 87, 118, 146, 147, 210, 250: n = A,T,C or G
acctatggacgtgagatccaagtgacagagcttctngacaagttanacatttatgtcctgcctgtgctcaatattgatggctacatntacacctggaccaagagccgattttggaggntgactcgctccacccatactggatctannttgcattggcacagaccccaacagaaattttgatgctggttggtgtgaaattggagcctctcnaaacccctgtgatgaaacttactgtggacctgccgcagantctgaaaaggagaccaaggccctggctgatttcatccgcaacaaactctcttccatcaaggcatatctgacaatccactcgt

SEQ ID NO: 4244 - DNA, 411 bp, Homo sapiens
acagaataattcttcgttgtgtggcactaacccacacactgcaggacatcgttctccctggctgcatccactcagtgctgggagtagtccccagttattatgaaaccaccaataacccactgaccacagtgagaaccactgattttttccactgacctactgaatatctagcatccttagattggctcaactgttactttcctaaggagtccttctacagaataggtcagatcttggcctcccaaaccccttatttttaaaatactttgcgccttgctttgataatttgtattatgtatccaaactgaaattatctgctttctgcattagaatgtaagccccctgagggttgagtcagtctgtcttgtttgctgtgccacgcctgatgcccagcccagcagcatgctctgt

SEQ ID NO: 4245 - DNA, 213 bp, Homo sapiens; identical to SEQ ID NO: 3148

SEQ ID NO: 4246 - DNA, 331 bp, Homo sapiens; identical to SEQ ID NO: 3037

SEQ ID NO: 4247 - DNA, 276 bp, Homo sapiens
acagagactttccatagagtctcttgaagtgtgcccggatatccaacatgtcaatttctgctcgagaaaccatcactctgatgagggtgttatcatcggtgcccaagcccttcatcgatttatagagcttttcagcaaaatatgcagatttgttcctcatgcactttactatagccagcagagcatcttcaaagctaccagatgtttcagatttaatactctgttcaatatccttctgtgatatccttttgtattcatcaaacacatgcaacaggt

SEQ ID NO: 4248 - DNA, 331 bp, Homo sapiens; identical to SEQ ID NO: 3037

SEQ ID NO: 4249 - DNA, 552 bp, Homo sapiens
acatcttcagaatgtttctggagttgaaaggcacagtgcaaatagaaattactacaatcaacaaaattgattttaaaaagtatttttagcacaaaaaagttttctttatatcatactaaattcagagcattacatcattcccagaatacctagtttgaagcttatttttttttccattcacttgcaagctggattaagacattaactataataatatggaatgttcagcatttatgtttggtaaccagatgtatatggtttgtataaccatactttagaatttagttcagataaattggttttggtatactttgactacagaaagtgatttcaacataagatgtgatgaaggaagtctcccatgaaaaacttagtaaggatcaactgatgctatggacaaaacctaaaaaaagagatttgtagatgctttcaaggctttgactatgaaatatagaaaactggatgggcattcttactgaccggatgcttacaatttcaaatgaagaaactactagccactctaaaaattggattagggaaaaaagtgatttt

SEQ ID NO: 4250 - DNA, 546 bp, Homo sapiens
  misc_feature 464: n = A,T,C or G
actatctggtttgagagtgcccttgaaaatttcatactgcttagagtttcctttatttccgaacaaagaaactagtatgtgtcctgtaaccttttttccagacagtgtgacagataccttatacctccaacgtgcaaaattactggcatcaccagtgtctagataaaatttctggcccacatcatttgttttcccaggatatctatcagcatagtgacccatctgtgggcagcctccacttggacaagggaaacacttgtttgcagtgaagacgttgtaagaggcacaggggaatccagcaaagccatcagggttgacgatgctatcagtgtaatatttgtagcttcttaagtgattacaggccgcaaagtctcgagtcccttcccagattccgtctatgtccacaatctgagagagaatgttctttttacatccaggcatttccactcctccatttggaaagnaaatctaggtggcccacgacttggctcattccaaaccccaaattggggactatgggggcaccatccgtgtgaattacatcca

SEQ ID NO: 4251 - DNA, 503 bp, Homo sapiens
atcgctcctactgctactactttaatgaagaccctgagacctgggttgatgcagatctctattgccagaacatgaattcaggcaacctggtgtctgtgctcacccaggcggagggtgccttcgtggcctcactgattaaggagagtagcactgatgacagcaatgtctggattggcctccatgacccaaaaaagaaccgccgctggcactggagtagtgggtccctggtctcctacaagtcctgggacactggatccccgagcagtgctaatgctggctactgtgcaagcctgacttcatgctcaggattcaagaaatggaaggatgaatcttgtgagaagaagttctcctttgtttgcaagttcaaaaactagaggaagctgaaaatggatgtctagaactggtcctgcaattactatgaagtcaaaaattaaactagactatgtctccaactcagttcagaccatctcctccctaatgagtttgcatcgctgatcttcagt

SEQ ID NO: 4252 - DNA, 331 bp, Homo sapiens
  misc_feature 142, 143: n = A,T,C or G
acctatggacgtgagatccaagtgacagagcttctcaacaagttagacttttatgtcctgcctgtgctcaatattgatggctacatctacacctggaccaagagccgattttggagaaagactcgctccacccatactgganntagctgcattggcacagaccccaacagaaattttgatgctggttggtgtgaaattggagcctctcgaaacccctgtgatgaaacttactgtggacctgccgcagagtctgaaaaggagaccaaggccctggctgatttcatccgcaacaaactctcttccatcaaggcatatctgacaatccactcgt

SEQ ID NO: 4253 - DNA, 445 bp, Homo sapiens
ggaaatgcctggatgtaaaaagaacattctctctcagattgtggacatagacggaatctgggaagggactcgagactttgcggcctgtaatcacttaagaagctacaaatattacactgatagcatcgtcaaccctgatggctttgctggattcccctgtgcctcttacaacgtcttcactgcaaacaagtgtttcccttgtccaagtggaggctgcccacagatgggtcactatgctgatagatatcctgggaaaacaaatgatgtgggccagaaattttatctagacactggtgatgccagtaattttgcacgttggaggtataaggtatctgtcacactgtctggaaaaaaggttacaggacacatactagtttctttgttcggaaataaaggaaactctaagcagtatgaaattttcaagggcactctcaaaccagatagt

SEQ ID NO: 4254 - DNA, 207 bp, Homo sapiens
acactcaaactttatttggttgcctggatagggccagagaggaggacaagaagggtgtcaaagggtcagctcagtaggggtgattcagggtgtgctccatgatggtcagaagcgccagccacgtctccttggctgtggggatgatctgggaggctggcagcaggaagccatagcgcccagtgtcccggagctcgaaggtgaaggagt

SEQ ID NO: 4255 - DNA, 516 bp, Homo sapiens
  misc_feature 449: n = A,T,C or G
actgccgacagctagggggtaaagaaaagtcattgggacacactgttgtctccacatgccactgtgtctgtctgcaaatgtaggcaggctggggtcctgccccagggaagacagagtcataacagagtaataaagaagcatgtttgagacacaggagtgtctatgtctatcctcattcctccctcacagccatcaccagagcatgtttcttgcaccaggtcaatagacagtaagagacagtaagagaggcatgaaaagcccattgtccacacatgttgcagcttctttttggagaatgttttccaggccttttatgttctgtctctgattctcagaactctgcaaggtcagtgtgaccaccctgctccaaatctaagaaaacagaggtttccagaggaaggagaaattgtgcccagggtcacacagcttgcaagaggcagagtggaagntgattccagctctgcctgcaggaccctctcatttcccctctgtttcccttcttgacaaaggatcttc

SEQ ID NO: 4256 - DNA, 525 bp, Homo sapiens
  misc_feature 396: n = A,T,C or G
acagcttggaaggatgaaaatagaaaccaatagattactggaagaattggttcggaaagagaaagaattacaagcactccttcatcgagctattgaagaaaaagaccaagaaattaaacacctgaagcttaagtcccaacccatagaaattcctgaattgcctgtatttcatctaaattcttctggcacaaatactgaagattctgaacttaccgactggctgagagtgaatggagctgatgaagacactataagccggtttttggctgaagattatacactattggatgttctctactatgttacacgtgatgacttaaaatgcttgagactaaggggagggatgctgtgcacactgtggaaggctatcattgactttcgaaacaaacagacttngactgttgctcaatctaatcttcgatggaaattctaaaaattaatacagagctgatcttcttgggggtgggaaaatcgaagggagaggagaaaggcgctgcactttaatccagtatttgtttactcatg

SEQ ID NO: 4257 - DNA, 340 bp, Homo sapiens
acaaaacacaaccgaggagcgtatacagttgaaaacatttttgttttgattggaaggcagattattttatattagtattaaaaatcaaaccctatgtttctttcagatgaatcttccaaagtggattatattaagcaggtattagatttaggaaaacctttccatttcttaaagtattatcaagtgtcaagatcagcaagtgtccttaagtcaaacaggtttttttttgttgttgtttttgctttgtttccttttttagaaagttctagaaaataggaaaacgaaaaatttcattgagatgagtagtgcatttaattattttttaaaaaactttttaagt

SEQ ID NO: 4258 - DNA, 291 bp, Homo sapiens
  misc_feature 66, 105, 146, 151, 163, 173, 180, 216, 278: n = A,T,C or G
acaagcttttttttttttttttttttttttttttttggggagatctttattctttattcaggatgngggatcgatcagcactgccagctgggccttggttctagnggcttgctatggtctcctcaatccagtcgatgaaggcgganactcnaatgaacaccgngggcttccanatgaagntgcagccaaagccaaaaacaaagctggtcacaccgnggacccgccagccaccatcctttgtggggcagttgaggggtcctccaaagtcaccgttgcanccggagcggatgt

SEQ ID NO: 4259 - DNA, 303 bp, Homo sapiens
  misc_feature 297: n = A,T,C or G
actcattccaatgaatttgactcagatgtggatgttggggacttgcagatggttaaatttatttggtataacaatgtgatcaacccaactttacctagagtgggagcatccaagattatagtggagacaaatgttggaaaacagttcaacttctgtagtccagaaaccgtcagggaggaagttctgctcaccctcacaccgtgttaggagactactgttatttgaccaatgaattgacttctaataaaatctagtggtgatgcaaaaaaaaaaaaaaaaaaaaaaaaaaaaaaaaangcttgt

SEQ ID NO: 4260 - DNA, 488 bp, Homo sapiens
  misc_feature 425: n = A,T,C or G
aaactggctggccaatgtgtgcaagaatctgttcaaggtggaaagtgtgaactgtatctgtgtggactggaaaggtggctcccgaactggatacacacaagcctcgcagaacatcaggatcgtgggagcagaagtggcatattttgttgaatttcttcagtcggcgttcggttactcaccttccaacgtgcatgtcattggccacagcctgggtgcccacgctgctggggaggctggaaggagaaccaatgggaccattggacgcatcacagggttggacccagcagaaccttgctttcagggcacacctgaattagtccgattggaccccagcgatgccaaatttgtggatgtaattcacacggatggtgcccccatagtccccaatttggggtttggaatgagccaagtcgtgggccacctanatttctttccaaatggaggagtggaaatgcctggatgtaaaaagaacattctctctcagattg

SEQ ID NO: 4261 - DNA, 561 bp, Homo sapiens
gtagcaggaaaagaagtttgctacgaaagactcggctgcttcagtgatgactccccatggtcaggaattacggaaagacccctccatatattgccttggtctacaaaagatgtcaacacccgcttcctcctatatactaatgagaacccaaacaactttcaagaagttgccgcagattcatcaagcatcagtggctccaatttcaaaacaaatagaaaaactcgctttattattcatggattcatagacaagggagaagaaaactggctggccaatgtgtgcaagaatctgttcaaggtggaaagtgtgaactgtatctgtgtggactggaaaggtggctcccgaactggatacacacaagcctcgcagaacatcaggatcgtgggagcagaagtggcatattttgttgaatttcttcagtcggcgttcggttactcaccttccaacgtgcatgtcattggccacagcctgggtgcccacgctgctggggaggctggaaggagaaccaatgggaccattggacgcatcacagggttggacccagcagaaccttgctttcag

SEQ ID NO: 4262 - DNA, 518 bp, Homo sapiens
actgaagatcagcgatgcaaactcattagggaggagatggtctgaactgagttggagacatagtctagtttaatttttgacttcatagtaattgcaggaccagttctagacatccatttttcagcttcctctagtttttgaacttgcaaacaaaggagaacttcttctcacaagattcatccttccatttcttgaatcctgagcatgaagtcaggcttgcacagtagccagcattagcactgctcggggatccagtgtcccaggacttgtaggagaccagggacccactactccagtgccagcggcggttcttttttgggtcatggaggccaatccagacattgctgtcatcagtgctactctccttaatcagtgaggccacgaaggcaccctccgcctgggtgagcacagacaccaggttgcctgaattcatgttctggcaatagagatctgcatcaacccaggtctcagggtcttcattaaagtagtagcagtaggagcgataggcattggtgcct

SEQ ID NO: 4263 - DNA, 364 bp, Homo sapiens
acaagactataaactcctaaaggcctgataatgggccatcccaaccgactctcaccctggggactgaccctccccagctaagagggagtgccagaaggacacagggatgacataacaagtgggtcccataggaaagtgtcagaaagctggaaccctgccaggtaacaggagacttcctaaagccacttttattgacaataaattgatgataaaagagatcaagggagttgctgagaagagagattaagagaggccggaagaagaatatcctttaggagaagaagacaacctagaaatcatacagttttgcttatttttcattaaagaaaatgaaaatgatgaaagagctggtagaaagcaaagt

SEQ ID NO: 4264 - DNA, 552 bp, Homo sapiens
actctcgaagaggtgcgacttgatccctctgatgctgactttgttgatgtgattcacacggatgcagctcccctgatcccattcttgggttttggaacgaaccaacagatgggtcatcttgacttcttccccaatggaggagagagcatgccgggatgcaagaagaatgccctgtctcagatcgtggatctagatggcatctgggcgggaacccgggactttgtggcttgcaatcacctaagaagctacaagtattacttggaaagcatcctcaatcccgatgggtttgctgcatatccctgcacttcctacaagtcctttgagtctgacaagtgcttcccgtgtccagatcaaggatgcccacagatgggtcactatgctgataaatttactggcaggacaagtgaagagcagcagaaattcttcttgaacacaggagaggctagcaatttcgctcgctggagatatggggtttccatcacactgtctggaagaacagccactggtcagatcaaagttgctttgtttggaaataagggaacactcaccagt

SEQ ID NO: 4265 - DNA, 371 bp, Homo sapiens
acacatattcatgccactcggctctgaaaagaggttcaaggtgggtcaaggtgggtcttggccagtggaggaaggaaggtgtccaggactttagttaatcaacagtggggacagagaggaatgatttcccttggaatacaacagggttcctttctcatattcttgtggccagaaactggggtgaacttcagtggggtaatgaaagaaacaggagagccatttctccaggaactcctatgacctccattttaacttctgacaaagttaacttcatttatacaatcgtattgaaaacagtaatcacaaccaaaaaggtcctataaacctgtaatagatgtcaaagggattcacattctgaactttaattttaa

SEQ ID NO: 4266 - DNA, 542 bp, Homo sapiens
  misc_feature 390, 537: n = A,T,C or G
actcggcacaaatcaaaggccaatacaagtctgaaaagcagaaataaatatttttccaggtttttgcttgggcacatactaactgctttgggcattctaatctggtctccaaacaccaaagacccatttcgagcctgctattagcctgctgctgactctatcacttggagcaataatgtggggttatggtggtggaatcttgtatatttttgtcaaaaataaaaccttgagttaaggggatagatatagatggaaaaatacacaaataaatacggtatgaaaacacatggaaatgtgtctttgtcaaatatgaatcattattaccatcacaaaaattcttctcttggccaatatctcatttccctatatagtatacaagcaccatttctnctcaatttttaagaagagaaattagtccattaccacaaggggttcttgtcactactaattatacaacaatcttttcccaacaaaaagatgtcctccacaacctttgttttcaaagcagacagcatctatgtggccaaatatactttngggtt

SEQ ID NO: 4267 - DNA, 303 bp, Homo sapiens
  misc_feature 177, 265, 268: n = A,T,C or G
actcattccaatgaatttgactcagatgtggatgttggggacttgcagatggttaaatttatttggtataacaatgtgatcaacccaactttacctagagtgggagcatccaagattatagtggagacaaatgttggaaaacagttcaacttctgtagtccagaaaccgtcagggangaagttctgctcaccctcacaccgtgttaggagactactgttatttgaccaatgaattgacttctaataaaatctagtggtgatgcanaanaaaaaaaaaaaaaaaaaaaaaaaaaaaaagcttgt

SEQ ID NO: 4268 - DNA, 331 bp, Homo sapiens; identical to SEQ ID NO: 2994

SEQ ID NO: 4269 - DNA, 281 bp, Homo sapiens
acttgacaaattcagaacttttccatttacttttacaacggaattactgagcccaaaccaatagaagaaatcaaataatgcatcagctttgaattcatatgcaaagcttaaattttctccattaaccacttcatttcctggggggaagaaattcttcactgcctcttgaaaatcaaactgaagccggtaactttctccaatcactgaggagatgaccatgtccatcccttgctctatctgtcttcttatcttggggtgcctcgtgtttacaagaaacgcgt

SEQ ID NO: 4270 - DNA, 288 bp, Homo sapiens
  misc_feature 32, 114, 200, 225, 239: n = A,T,C or G
actttggcctctctgggatagaagttattcancaggcacacaacagaggcagttccagatttcaactgctcatcagatggcagggaagatgaagacagatggtgcagccacagntcgtttgatttccacgttagtccctgggccgaacgtccacggtgagtcaccatagtggtgacagtaatacactgcaaaatcttcangctccagtctgctgatggtgagagngaagtctgtcccanacccaccgccactgaacctgtctgggatgccagtggccctgatggaagt

SEQ ID NO: 4271 - DNA, 495 bp, Homo sapiens
ccagaccctgaattcttctagctcctccaatcccattttatcccatggaaccactaaaaacaaggtctgctctgctcctgaagccctatatgctggagatggacaactcaatgaaaatttaaagggaaaaccctcaggcctgaggtgtgtgccactcagagacttcacctaactagagacaggcaaactgcaaaccatggtgagaaattgacgacttcacactatggacagcttttcccaagatgtcaaaacaagactcctcatcatgataaggctcttacccccttttaatttgtccttgcttatgcctgcctctttcgcttggcaggatgatgctgtcattagtatttcacaagaagtagcttcagagggtaacttaacagagtatcagatctatcttgtcaatcccaacgttttacataaaataagagatcctttagtgcacccagtgactgacattagcagcatctttaacacagccgtgtgttcaaatgt

SEQ ID NO: 4272 - DNA, 498 bp, Homo sapiens
acagttggacctgctggcattcgaggccctcagggtcaccaaggccctgctggcccccctggtccccctggccctcctggacctccaggtgtaagcggtggtggttatgactttggttacgatggagacttctacagggctgaccagcctcgctcagcaccttctctcagacccaaggactatgaagttgatgctactctgaagtctctcaacaaccagattgagacccttcttactcctgaaggctctagaaagaacccagctcgcacatgccgtgacttgagactcagccacccagagtggagcagtggttactactggattgaccctaaccaaggatgcactatggatgctatcaaagtatactgtgatttctctactggcgaaacctgtatccgggcccaacctgaaaacatcccagccaagaactggtataggagctccaaggacaagaaacacgtctggctaggagaaactatcaatgctggcagccagttt

SEQ ID NO: 4273 - DNA, 250 bp, Homo sapiens
tttttttttttttttgaagaactatttattattagagaaagtccagagtccagaaaaagaaggctgaatccagagtggaaagacagatacaatgccctaggagggtgcagggtcaagaggaagaggggagcccacgtgtcgaggcagcaagtctaggcggcagtggcaaagcctactctgttgttgcccaagtcgtagacggaatagtaggacctgaggaagacatccccgaggatccacaggggctggc

SEQ ID NO: 4274 - DNA, 164 bp, Homo sapiens
ctgctgacagttctttggtggaaaagtaagttgcgtacttacccaagctgcccaaatgattatcaaaccaagtttgtttttcaaaaataggttttaagatacaccaaagaaactatacaatacaaaaatttaacaatgaagttaaagtatatagcaaaagccaa

SEQ ID NO: 4275 - DNA, 396 bp, Homo sapiens
aaagaagaactatttattattagagaaagtctagagtccagaaaaagaaggctgaatccagagtggaaagacagatacaatgccctaggagggtgcagggtcaagaggaagaggggagcccacgtgtcgaggcagcaagtctaggcggcagtggcaaagcctgctctgttgttgcccaagtcgtagacggaatagtaggacctgaggaagacatccccgaggatccacaggggctggccgttctgggaggacaggtaggtgggctcgactcccacggtgcagtagccgttgttactgaggatataggaggaaggtggcagagggaactccacaccattgatgatgaaggtcaagctgggcagattctgaatgctgttacagttcacgagaaactgt

SEQ ID NO: 4276 - DNA, 456 bp, Homo sapiens
  misc_feature 37, 356: n = A,T,C or G
tttttttttttacttcattggaaaaggattttatttnaccataaaaatgcaaactggaataaacaccatctttcctaacgcgaacgttacagctatttttaggtatttctgagcttcacttggagaagcaaacgattataaaacaagtttgcagcctgaaatctgtttgaaacattccaagtaaaaataatttagcaaaacagcttcttaaaaaaaccacacacactaacctttactagaaaccaaagcttttaaccaatcttttttatgcttaattccttgacgttgtaaaaagtgaatgtttttgaaggagcatcagaccattttgtaccactccccacataccgacaccttanaaagaacggcccgtttgagttttgatcttaaaggacttgtaccttcctcatccgtgactcaatgtcagcacgacgattcggcatcccacccaaactgcac

SEQ ID NO: 4277 - DNA, 564 bp, Homo sapiens
aaacattacccagcatcattgtttataatcagaaactctggtccttctgtctggtggcacttagagtcttttgtgccataatgcagcagtatggagggaggattttatggagaaatggggatagtcttcatgaccacaaataaataaaggaaaactaagctgcattgtgggttttgaaaaggttattatacttcttaacaattctttttttcggggacttttctagctgtatgactgttacttgaccttctttgaaaagcattcccaaaatgctctattttagatagattaacattaaccaacataattttttttagatcgagtcagcataaatttctaagtcagcctctagtcgtggttcatctctttcacctgcattttatttggtgtttgtctgaagaaaggaaagaggaaagcaaatacgaattgtactatttgtaccaaatctttgggattcattggcaaataatttcagtgtggtgtattattaaatagaaaaaaaaattttgtttcctaggttgaaggtctaattgatacgtttgacttatgatgaccatttatgca

SEQ ID NO: 4278 - DNA, 562 bp, Homo sapiens
  misc_feature 560: n = A,T,C or G
ctgtactaccaaatcaggaagatgtaaggtttacaaattggctaagaatcatggctctgtagccatttcaaccagaataattttattgctaatctgctttgtgtgacagcattccaggccagccagatgggactgccttgtctggaggctttgttcatctcgaaggacacacacttccacactgtttgtgagccctcccacctccacaacttcagttgtaaatcaagtgtgtggatctcaaagggtgcaattcatctttatataggaatacatttctagggcttccttcaagcccactctcttcaccctattttttcttatcttaaattgagagaaagagaattaatcttatactttgtcaaaacattttctaccatatttccagatgacatctgcgcttgaagagtcaaaggaatctgtgtctaatatcctgtttttaactgctgtaggggcaggatggaaaggatgatgggggctgccacaccactgattggccttttctttcacgtgattcatccttcctcattgtggcaaggagtttctttctctttttcttcctnct

SEQ ID NO: 4279 - DNA, 423 bp, Homo sapiens
ccaatgttgacaataacaacggatgggactcctggaattccatctgggattatggaaatggctttgctgcaaccagactctttcaaaagaagacatgcattgtgcacaaaatgaacaaggaagtcatgccctccattcaatcccttgatgcactggtcaaggaaaagaagcttcagggtaagggaccaggaggaccacctcccaagggcctgatgtactcagtcaacccaaacaaagtcgatgacctgagcaagttcggaaaaaacattgcaaacatgtgtcgtgggattccaacatacatggctgaggagatgcaagaggcaagcctgtttttttactcaggaacgtgctacacgaccagtgtactatggattgtggacatttccttctgtggagacacggtggagaactaaacaatttttt

SEQ ID NO: 4280 - DNA, 476 bp, Homo sapiens
aaaaaaaaatttggaaacatgtaacaaagcaagggtaaaatatatatatatatctatataagtgctgtgactgtaaaagtgtactttccattaattattagccgagttaagagaatggtcacattgaagtactgtgtggactagaaatgtaccctgtcatcatgcaatgaaatattgttatcgttttaacatagctcatttatgtagaatgaattctggtggtttaccccaagtcacagttaggacggtagatggtgagatcgcagatgcgctattatctagattcagtgttacattttcgatgtttatcactcagtgggtttttattaatatgctgattaagttatttactgggccagtcattgtgctaaatagttgctcttttgtgtttcattgccttgatgtttgagtgtaatctagcattttaatacagtgtttattttgcatgatctttaacaaatgttttaagcaatttt

SEQ ID NO: 4281 - DNA, 362 bp, Homo sapiens
  misc_feature 15, 162, 221, 281, 315: n = A,T,C or G
ctttgctgcaaccanactctttcaaaagaagacatgcattgtgcacaaaatgaacaaggaagtcatgccctccattcaatcccttgatgcactggtcaaggaaaagaagcttcagggtaagggaccaggaggaccacctcccaagggcctgatgtactcagncaacccaaacaaagtcgatgacctgagcaagttcggaaaaaacattgcaaacatgtgtngtgggattccaacatacatggctgaggagatgcaagaggcaagcctgtttttttactcangaacgtgctacacgaccagtgtactatggattgnggacatttccttctgtggagacacggtggagaactaaacaatttttt

SEQ ID NO: 4282 - DNA, 303 bp, Homo sapiens
tttttttttttttagagaagaactatttattattagagaaagtccagagtccagaaaaagaaggctgaatccagagtggaaagacagatacaatgccctaggagggtgcagggtcaagaggaagaggggagcccacgtgtcgaggcagcaagtctaggcggcagtggcaaagcctactctgttgttgcccaagtcgtagacggaatagtaggacctgaggaagacatccccgaggatccacaggggctggccgttctgggaggacaggtaggtgggctcgactcccacggtgcagtagccgtt

SEQ ID NO: 4283 - DNA, 291 bp, Homo sapiens
ccattcaatcccttgatgcactggtcaaggaaaagaagcttcagggtaagggaccaggaggaccacctcccaagggcctgatgtactcagtcaacccaaacaaagtcgatgacctgagcaagttcggaaaaaacattgcaaacatgtgtcgtgggattccaacatacatggctgaggagatgcaagaggcaagcctgtttttttactcaggaacgtgctacacgaccagtgtactatggattgtggacatttccttctgtggagacacggtggagaactaaacaatttttt

SEQ ID NO: 4284 - DNA, 429 bp, Homo sapiens
aaaaaaattaatagtttcctatggaactgatctaagattagaaaaattaattttctttaatttcattatgaacttttatttacatgactctaagactataagaaaatctgatggcagtgacaaagtgctagcatttattgttatctaataaagaccttggagcatatgtgcaacttatgagtgtatcagttgttgcatgtaatttttgcctttgtttaagcctggaacttgtaagaaaatgaaaatttattttttttttctaggacgagctatagaaaagctattgagagtatctagttaatcagtgcagtagttggaaaccttgctggtgtatgtgatgtgcttctgtgcttttgaatgactttatcatctagtctttgtctatttttcctttgatgttcaagtcctagtctataggattggcagttt

SEQ ID NO: 4285 - DNA, 196 bp, Homo sapiens
  misc_feature 35, 179: n = A,T,C or G
ttttttttttttgcgcagaggcacaatcattttanataaaaaaaaattgaacaaagagaccctcttgcgagaggtgagatgaggccctgccatgcaaaggagtcccagcagaggaggaagaattccatcctggagttcaagtttctgtgcagagacaggacctggggacagagaacggncctccacccaatttcag

SEQ ID NO: 4286 - DNA, 176 bp, Homo sapiens
ctcctctgtccactgctttcgtgaagacaagatgaagttcacaattgtctttgctggacttcttggagtctttctagctcctgccctagctaactataatatcaacgtcaatgatgacaacaacaatgctggaagtgggcagcagtcagtgagtgtcaacaatgaacacaatgtgg

SEQ ID NO: 4287 - DNA, 253 bp, Homo sapiens
aaaccaaaccagaggaagtatttgtggaactcactgcctcagtttgggtaaaggatgagcagacaagtcaactaaagaaaaaagaaaagcaaggaggagggttgagcaatctagagcatggagtttgttaagtgctctctggatttgagttgaagagcatccatttgagttgaaggccacagggcacaatgagctctcccttctaccaccagaaagtccctggtcaggtctcaggtagtgcggtgtggctcag

SEQ ID NO: 4288 - DNA, 123 bp, Homo sapiens
aaaaaaaaagcctctttcagtgcaagtggggtgccaaggatgtagaataaataagagggggccaggatcagtgcacagggaggaagcgcccacggacgctccgctccagcccgggcatcctgg

SEQ ID NO: 4289 - DNA, 439 bp, Homo sapiens
aaatgtgattttttaatattatcactataatctcaagagaggcagaaacacttgcaatcaaaatgatgaatttgaaaatataaatatgtaatctcccacccccattctacaaagaatgcatttatttcctggaaactgccatatcaactttcaatgatcatgttcacttgcaaaagaaatccacttaaaaaaatcacagtattgttgcaaacatcaaagatttttatacaagtataggaagtacacacttaaaatatcagactggaacacttaccaaacagtgttttcctaaagtagtatctatagtacatttctttattcatatatcttcaaatggtcaagttttctttcatacatccaaaatgtaatgtgatgttttcttattcaccaaatgttagctctacttgcagtctggttccaaactaatcagcctgctttt

SEQ ID NO: 4290 - DNA, 411 bp, Homo sapiens
aaccgactacttcagaggaaacaaatggtcattgatgtccttcaccccgggaaggcgacagtgcctaagacagaaattcgggaaaaactagccaaaatgtacaagaccacaccggatgtcatctttgtatttggattcagaactcattttggtggtggcaagacaactggctttggcatgatttatgattccctggattatgcaaagaaaaatgaacccaaacatagacttgcaagacatggcctgtatgagaagaaaaagacctcaagaaagcaacgaaaggaacgcaagaacagaatgaagaaagtcagggggactgcaaaggccaatgttggtgctggcaaaaagaagtgagctggagattggatcacagccgaaggagtaaaggtgctgcaatgatgttagctgcgg

SEQ ID NO: 4291 - DNA, 290 bp, Homo sapiens
  misc_feature 67, 86: n = A,T,C or G
aaatcaactgatttgtatggaaaatggcacggcaaataaattagacctatgttaaagcgaaggtcanctaaatatccaaacttaangatataatgggcaccgataaacagattccacagtcttctttaatagagtatctttcaaacacaactttgctagaaactggtccaaagatcgacagcacgtgggaatgcttaacaggggtggtgatcagggacacgtttcctgggtgccgctttgatgatgttgtccacacgcagaatcacctctgctgcttcagacctcggccg

SEQ ID NO: 4292 - DNA, 512 bp, Homo sapiens
taaagtatggatggggtctcatgtttcccaggctggtcttgaactcctggccttaagtgttcctctttggcctcccagagggctggaactacaggcatgggtcaccatgccctatacgtcttagatctggattcaagtacactaattgaacatacattaaggagtcttgttgtttgatgactatttggttaggtttttaagaaatttggaggaaatcataaatctcggatttgctcagaaataacggatggggttgtaggcgatgaatgggatcaacgtgaagtaagatcacatcctcgaaaggttgggaaatatgggtccattagatacaaattttttacaatgtagaaaatgaaacaaagacctgcgaagttcacctggattattgtgacagtcaactggtcatcttcctctcctgtctattttcagcatcagccagggtactgattttgaaatggattatagcactgtttcaaatcctgcaacaggttttttttcccttttttcttttt

SEQ ID NO: 4293 - DNA, 507 bp, Homo sapiens
ctgctccagaaccaaccaggagctgcaggaaattaacagagtctacaaggaaatgtacaagactgatctggagaaggacattatttcggacacatctggtgacttccgcaagctgatggttgccctggcaaagggtagaagagcagaggatggctctgtcattgattatgaactgattgaccaagatgctcgggatctctatgacgctggagtgaagaggaaaggaactgatgttcccaagtggatcagcatcatgaccgagcggagcgtgccccacctccaaaaagtatttgataggtacaagagttacagcccttatgacatgttggaaagcatcaggaaagaggttaaaggagacctggaaaatgctttcctgaacctggttcagtgcattcagaacaagcccctgtattttgctgatcggctgtatgactccatgaagggcaaggggacgcgagataaggtcctgatcagaatcatggtctcccgcagtgaagtggacatgtt

SEQ ID NO: 4294 - DNA, 227 bp, Homo sapiens
aaatgttattttggaagacttacgatgcatgtatacaaacgaatagcagataatgatgactagttcacacataaagtccttttaaggagaaaatctaaaatgaaaagtggataaacagaacatttataagtgatcagttaatgcctaagagtgaaagtagttctattgacattcctcaagatatttaatatcaactgcattatgtattatgtctgcttaaatcattt

SEQ ID NO: 4295 - DNA, 193 bp, Homo sapiens
  misc_feature 36, 55, 57, 66, 73, 79, 93, 139: n = A,T,C or G
ctttttttttttttttttttttttttttttttacanaaaaactatttattattananaaagtccanagtccanaaaaanaaggctgaatccanagtggaaagacagatacaatgccctaggagggtgcagggtcaaaangaaaaggggagcccacgtgtcgaggcagcaagtctaggcggcagtggcaaagcc

SEQ ID NO: 4296 - DNA, 495 bp, Homo sapiens
cagaatcctaactatttctgaggaaactgcaggtccaaaatgtggctgcttttaacaatggcaagtttgatatctgtactggggactacacatggtttgtttggaaaattacatcctggaagccctgaagtgactatgaacattagtcagatgattacttattggggatacctaaatgaagaatatgaagttgtgactgaagatggttatattcttgaagtcaatagaattccttatgggaagaaaaattcagggaatacaggccagagacctgttgtgtttttgcagcatggtttgcttgcatcagccacaaactggatttccaacctgccgaacaacagccttgccttcattctggcagatgctggttatgatgtgtggttgggcaacagcagaggaaacacctgggccagaagaaacttgtactattcaccagattcagttgaattctgggctttcagctttgatgaaatggctaaatatgaccttccagcc

SEQ ID NO: 4297 - DNA, 424 bp, Homo sapiens
  misc_feature 133: n = A,T,C or G
ccaatgttgacaataacaacggatgggactcctggaattccatctgggattatggaaatggctttgctgcaaccagactctttcaaaagaagacatgcattgtgcacaaaatgaacaaggaagtcatgccctncattcaatcccttgatgcactggtcaaggaaaagaagcttcagggtaagggaccaggaggaccacctcccaagggcctgatgtactcagtcaacccaaacaaagtcgatgacctgagcaagttcggaaaaaacattgcaaacatgtgtcgcgggattccaacatacatggctgaggagatgcaagaggcaagcctgttttttttactcaggaacgtgctacacgaccagtgtactatggattgtggacatttccttctgtggagacacggtggagaactaaacaatttttt

SEQ ID NO: 4298 - DNA, 393 bp, Homo sapiens
  misc_feature 93, 182, 338: n = A,T,C or G
ctgccatgccaggaacctgtcctaaggaaccttccttcctgcttgagttcccagatggctggaaggggtccagcctcgttggaagaggaacancactggggagtctttgtggattctgaggccctgcccaatgagactctagggtccagtggatgccacagcccagcttggccctttccttncagatcctgggtactgaaagccttagggaagctggcctgagaggggaagcggccctaagggagtgtctaagaacaaaagcgacccattcagagactgtccctgaaacctagtactgccccccatgaggaaggaacagcaatggtgtcagtatccangctttgtacagagtgcttttctgtttagtttttactttttttgttttgttttttt

SEQ ID NO: 4299 - DNA, 296 bp, Homo sapiens
ttttttttttttttttttgcagtgggttatgtttttattctacgttattggtaggacagggaacagggccaagacctccacactcccctgggaagaacagtcaggagaattagatacatctaaagtgggcacaggacagaggccagatcttcctgggaggtggctgaagagacttaggcttaagccacgggggccaggccgacctggttgtttgccctgtcgaagacggtaaagtactggcggatgaagacatcacccaggatccaaagctctccagattcggtggggaggttcat

SEQ ID NO: 4300 - DNA, 62 bp, Homo sapiens
ccaatgttgacaataacaacgtatgggactcctggaattccatctgggattatggaaatggc

SEQ ID NO: 4301 - DNA, 331 bp, Homo sapiens
atcaaagcaaaaagaaaatgctgcataaaaataccaaacttcagcaactgttaatactcagatcatatacctcttaataaatagcatcttatgctaattagccctgctaaactatgtacagaggaaactgttcaagtattggatttgaaagtaagtgacttatgtttaacagaactaatgatgtattgaaacactgtattatgaaaagctaaattatacatcattgtaactatgtagaaagtgtagactaatgtataatcaaaatgctaaggatttttatatggccttgtatgaggggagtttgaatgttaataaacatgttttccacttt

SEQ ID NO: 4302 - DNA, 292 bp, Homo sapiens
  misc_feature 130: n = A,T,C or G
ctgcagaagcgtgtctgaggtgtccggtggaggtggcagccgagctctgggactaatcaccgtgctggggatggcaccgcgtcaggatgcaggcagatccctgcagaagtgtctaaaattcacactcctnttctggagggacgtcgatggtattaggatagaagcaccaggggaccccacgaacggtgtcgtcgaaacagcagcccttatttgcacactgggagggcgtgacaccaggaaaaccacaattctgtctttcacggggggccactgtacacgtctctgtctgggc

SEQ ID NO: 4303 - DNA, 402 bp, Homo sapiens
ctggcgatggggagttaatgcttggtgtggatgacaggtgtggggatgcggatatcctggcctctctccagacgccgttcacaatcaatcaaatagtttactccatcgatgaccagttgcaccagctccacctctgatttgcctagtcggtccaaattagaaatatcaaagacaccgcctgtggcagcagtgtccactcctccagtaccacgcttttggagtcttaggttctccaggatctttgggaagcggctatctttgcttagcaggggcagtttgatgtgcactcctgcccgaagtccagtgcccaggttagatggacaggtcaagatgtatcccaaacgctcattccacatgaactcccagccacgttcttggataagtctctccacctctttgagg

SEQ ID NO: 4304 - DNA, 189 bp, Homo sapiens
agcacatagagattcacccatgtttgttgaacttagagtcattctcatgcttttctttataattcacacatatatgcagagaagatatgttcttgttaacattgtatacaacatagccccaaatatagtaagatctatactagataatcctagatgaaatgttagagatgctatatgatacaactgtgg

SEQ ID NO: 4305 - DNA, 316 bp, Homo sapiens
aaaatgaacaaggaagtcatgccctccattcaatcccttgatgcactggtcaaggaaaagaagcttcagggtaagggaccaggaggaccacctcccaagggcctgatgtactcagtcaacccaaacaaagtcgatgacctgagcaagttcggaaaaaacattgcaaacatgtgtcgtgggattccaacatacatggctgaggagatgcaagaggcaagcctgtttttttactcaggaacgtgctacacgaccagtgtactatggattgtggacatttccttctgtggagacacggtggagaactaaacaatttttt

SEQ ID NO: 4306 - DNA, 423 bp, Homo sapiens; identical to SEQ ID NO: 4279

SEQ ID NO: 4307 - DNA, 434 bp, Homo sapiens
  misc_feature 427: n = A,T,C or G
caggtaaaaaaattaatagttttctatggaactgatctaagattagaaaaattaattttctttaatttcattatgaacttttatttacatgactctaagactataagaaaatctgatggcagtgacaaagtgctagcatttattgttatctaataaagaccttggagcatatgtgcaacttatgagtgtatcagttgttgcatgtaatttttgcctttgtttaagcctggaacttgtaagaaaatgaaaatttaatttttttttctaggacgagctatagaaaagctattgagagtatctagttaatcagtgcagtagttggaaaccttgctggtgtatgtgatgtgcttctgtgcttttgaatgactttatcatctagtctttgtctatttttcctttgatgttcaagtcctagtctataggattngcagttt

SEQ ID NO: 4308 - DNA, 134 bp, Homo sapiens
  misc_feature 84: n = A,T,C or G
ccaacaggacagagcacatcacacgtataggcaggtgtgagggacagtggctaagaattgcctgctccctctgcatgctctttnttgtttccaaagtccaatcaagtgatcctgggaaacaaatctgtctggat

SEQ ID NO: 4309 - DNA, 423 bp, Homo sapiens; identical to SEQ ID NO: 4279

SEQ ID NO: 4310 - DNA, 423 bp, Homo sapiens; identical to SEQ ID NO: 4279

SEQ ID NO: 4311 - DNA, 503 bp, Homo sapiens
aaaaataaatatgtactacggaatatctcgaaaaactgcactagagacaaagacgtgatgttaatatcttttccccacaattattacggataaacagtagcaccaataaataaatgataacaaatattaaaattaaaaaaggagagagatttagtatgtagaattctctattttttcttgttttgtttttacatataaaaaacagaatagcaatgtctattttatcagaatcacatatatacataaacatatatatatatatatacacacaaatacaagttgccaaatatatatatagtatgtagatgtatattgaaaccttatttcaaaggaatgtgtgctggggagccaggggatcggggagggcagagctgagtgttagcaaaattaaatatctgttcaagataggctagtgactgtcaccgatcagggagagagagattggaaacatgaattttatatacaaaaaccggtacaaataagagagcaagagagagcaaaag

SEQ ID NO: 4312 - DNA, 213 bp, Homo sapiens
tgaaagaacttgcatgttggtgaaggaagaagtggggtggaagaagtggggtgggacgacagtgaaatctagagtaaaatcaagctggcccaaggtgtcctgcaggctgtaatgcagtttaatcagagtgccagttttttttttgttcaaatgattttaattattggaatgcacaatttttttaatatgcaaataaaaagtttacctcggccg

SEQ ID NO: 4313 - DNA, 144 bp, Homo sapiens
aaagaagaactatttattattagagaaagtccagagtccagaaaaagaaggctgaatccagagtggaaagacagatacaatgccctaggagggtgcagggtcaagaggaagaggggagcccacgtgtcgaggcagcaagtctag

SEQ ID NO: 4314 - DNA, 302 bp, Homo sapiens
aaacagaagcagataaaaaaaaagatgcaggactccttcagttcttcactagtcttagaaaaactttccagaatactgcttcacactataaaaaagaaaaaatatcttgcattagaatccttcaacatctgcatactgcttcacactgttctgcagcaaatactgtgcattctgtatctggtcctgtgttcctgtaatggtaatgatccgatcttcggatccttctaaaggctcatcaattttgatcgaagctcccgactcatgacggatttgtttaatccgctgaccacctttgccaataa

SEQ ID NO: 4315 - DNA, 356 bp, Homo sapiens
gcaggtatttttttactatttagaatgtagccctttttgtactgatataatttagttccacaaatggtgggtacaaaaagtcaagtttgtggcttatggattcatataggccagagttgcaaagatcttttccagagtatgcaactctgacgttgatcccagagagcagcttcagtgacaaacatatcctttcaagacagaaagagacaggagacatgagtctttgccggaggaaaagcagctcaagaacacatgtgcagtcactggtgtcaccctggataggcaagggataactcttctaacacaaaataagtgttttatgtttggaataaagtcaaccttgtttctactgtttt

SEQ ID NO: 4316 - DNA, 554 bp, Homo sapiens
  misc_feature 433, 521: n = A,T,C or G
ctgaagctggatcttttttctgtcctacctggaagcttctcactgctggatgagaatggcttctaaaagtggatcttggggatccttgtgaatttgccctcggataaggagtgaagatcatttacggcacatgtggattatggtttacacaaagatgtccagttatttttccttctgactacccccaccaccacttcctgagatgagatgtctaggtataggaggatgtggctgttggggttagacttgattcagtgcaaaaacaagaaacagtgccccttaaacaagggctgtaacttaaatcagtttttcttggcaccttacaataagagcacatgcacaggaattgggaggattttgcatcctggatctactgcttaatttatttcatctctttaaggctcagtttcttttttttttttttcccctgtanagacagtgtcttgctatgtttccataggcttatctctaattctgggctcaagtgatcttcccatctcagcctcccaaagtgctggctngggattacaggcatgagccactgcacccagttc

SEQ ID NO: 4317 - DNA, 187 bp, Homo sapiens
aaaaaattgtttagttctccaccgtgtctccacagaaggaaatgtccacaatccatagtacgctggtcgtgtagcacgttcctgagtaaaaaaacaggcttgcctcttgcatctcctcagccatgtatgttggaatcccacgacacatgtttgcaatgttttttccgaacttgctcaggtcatcgac

SEQ ID NO: 4318 - DNA, 127 bp, Homo sapiens
  misc_feature 112, 126: n = A,T,C or G
aaagaatcctcaagaaggaggactgcaagtatatcgtggtggagaagaaggacccaaaaaagacctgttctgtcagtgaatggataatctaatgtgcttctagtaggcacanggctcccaggccang

SEQ ID NO: 4319 - DNA, 253 bp, Homo sapiens
  misc_feature 133: n = A,T,C or G
ctgagccacaccgcactacctgagacctgaccagggactttctggtggtagaagggagagctcattgtgccctgtggccttcaactcaaatggatgctcttcaactcaaatccagagagcacttaacaaactncatgctctagattgctcaaccctcctccttgcttttcttttttctttagttgacttgtctgctcatcctttacccaaactgaggcagtgagttccacaaatacttcctctggtttggttt

SEQ ID NO: 4320 - DNA, 258 bp, Homo sapiens
  misc_feature 8, 10, 16, 27, 54, 81, 108: n = A,T,C or G
accgtggncncggccnaggtaaagaanaactatttattattagagaaagtccanagtccagaaaaagaaggctgaatccanagtggaaagacagatacaatgccctangagggtgcagggtcaagaggaagaggggagcctacgtgtcgaggcagcaagtctaggcggcagtggcaaagcctactctgttgttgcccaagtcgtagacggaatagtaggacctgaggaagacatccccgaggatccacaggggctggc

SEQ ID NO: 4321 - DNA, 378 bp, Homo sapiens
  misc_feature 275, 357: n = A,T,C or G
ctgaggtctcttgagggagcttagccaatgtgggagcagcggtttggggagcagagacactaacgacttcagggcagggctctgatattccatgaatgtatcaggaaatatatatgtgtgtgtatgtttgcacacttgtgtgtgggctgtgagtgtaagtgtgagtaagagctggtgtctgattgttaagtctaaatatttccttaaactgtgtggactgtgatgccacgcagagtggtctttctggagaggttataggtcactcctggggcctnttgggtcccccacgtgacagtgcctgggaatgtattattctgcagcatgacctgtgaccagcactgtctcagtttcactttnacatagatgtccctttcttgg

SEQ ID NO: 4322 - DNA, 259 bp, Homo sapiens
ctgcagaagcgtgtctgaggtgtccggtggaggtggcagccgagctctgggactaatcaccgtgctggggatggcaccgcgtcaggatgcaggcagatccctgcagaagtgtctaaaattcacactcctcttctggagggacgtcgatggtattaggatagaagcaccaggggaccccacgaacggtgtcgtcgaaacagcagcccttatttgcacactgggagggcgtgacaccaggaaaaccacaattctgtctttc

SEQ ID NO: 4323 - DNA, 469 bp, Homo sapiens
  misc_feature 32, 36, 40, 76, 127, 244, 277, 311, 469: n = A,T,C or G
cttttttttttttttttttttttttttttgcnattnaaanatttactaaggtactctatgcattctatctatacanaaacacctatttattattacagttgatttatgcaggattaacatttttggngttaaaattgttaaacatcatgcttactgcacatcaactctccataatgaatctgaacttcacaatgatttaccaaacactttacttaaattactaattaaataaatgaaaaatgcnccgagccaaacaaaacttaactgggctataaanaaaaaaacccttcaaaacagtccatatacacatntatttcaaaactacctttgctagctagcccctttcccaaagttttagcctgaaaaaacagtaaaatctacacaaaattttattgcaatcatacaagggttacattaggtcaacaaatactatgatgcaattttacatttattaaactacagttcaaan

SEQ ID NO: 4324 - DNA, 530 bp, Homo sapiens
aaagttaaaaacgtaagtaaatcctgtcattgctaacagggccacatatggactcttactctttcctctagacccccagagtgtagaatgtgatacacttttgtccttttctctgaggatgtgctgcctagtgtcgtggaatctgcctgaccattgcaagcatccaattttgtgaccagttcttttgcaggaaattgtttctgagaagactggaagacaagaaatatcccacctcttctaacaagatctgaattgttcgaaaagcagccagtgcctaacttgtagctccacttatgccaactgtatatatacctctcgtgagcatagcaagtgatttaatattttgaaaagatggctaaaatccttttaatgaacagcactaaagttatatgtattagaggagaattattgaatgagatggagaaagagttctgaaattaatatttacattttggcttttttacagataatattatatttctgagtgaccagacgaaagagaaggagtagagaggatgattcttctttgg

SEQ ID NO: 4325 - DNA, 522 bp, Homo sapiens
aaatattctacccacacaacttctttgatcaatttcttgctactgaagtgtgctcccgtgagatgctgaatctcctttgcagcaatgccttatttataatttgtggatttgacagtaagaactttaacacgagtcgcttggatgtgtatctatcacataatccagcaggaacttctgttcaaaacatgttccattggacccaggctgttaagtctgggaaattccaagcttatgactggggaagcccagttcagaataggatgcactatgatcagtcccagcctccctactacaatgtgacagccatgaatgtaccaattgcagtgtggaacggtggcaaggacctgttggctgacccccaagatgttggccttttgcttccaaaactccccaatcttatttaccacaaggagattcctttttacaatcacttggactttatctgggcaatggatgcccctcaagaagtttacaatgacattgtttctatgatatcagaagataaaaagtagttctggattt

SEQ ID NO: 4326 - DNA, 510 bp, Homo sapiens
aaatccagaactactttttatcttctgatatcatagaaacaatgtcattgtaaacttcttgaggggcatccattgcccagataaagtccaagtgattgtaaaaaggaatctccttgtggtaaataagattggggagttttggaagcaaaaggccaacatcttgggggtcagccaacaggtccttgccaccgttccacactgcaattggtacattcatggctgtcacattgtaatagggaggctgggactgatcatagtgcatcctattctgaactgggcttccccagtcataagcttggaatttcccagacttaacagcctgggtccaatggaacatgttttgaacagaagttcctgctggattatgtgatagatacacatccaagcgactcgtgttaaagttcttactgtcaaatccacaaattataaataaggcattgctgcaaaggagattcagcatctcacgggagcacacttcagtagcaagaaattgatcaaagaagttgtgtg

SEQ ID NO: 4327 - DNA, 557 bp, Homo sapiens
  misc_feature 447, 538, 546: n = A,T,C or G
aaaggggtttgactgacgatagcttgatgcatccacaaattcatttgttcccgatctggcaatacaggaccatagaaaacacaaaacctttgacttgagtctgctggtaaagcttctgaatattgagtttgctgagaaataaaaatcaaaacttctttaagctggtaaagtgaggggcccaccagcagtgatctcctgatgccttactggaaactttgtttacttgtctgctaccctctgatttgtttttagttagtttttattgtgagcacacatagtacctagttacatcttaagatcaggtgtataaaactgtggagtggagcggtatggtatggaatgacttggaatgtaagctgtcagggagaaaatgttgttacacttttgctaagatctgggggtttcttcatattcctgctgttggaagcagttgaccagagatgcttnccagtactgccaaagcactgctgtgaaatgtgaagtactttgtttttttatttttaatgattttccttttgttattaatatttttctctgntcctttgntattacttgca

SEQ ID NO: 4328 - DNA, 274 bp, Homo sapiens
  misc_feature 38, 70, 81, 105, 121, 253: n = A,T,C or G
cttttttttttttttttttttttttttttttagcaggnaaaaattatacttttatttgagtcaccagganaaagattcacnttgtggttcaagtcaaatgttcanaatcataacaggccanaaaggtttgatcccgagcacaagcccacgagggaggggaccaaaacagaccaaaatgagacaacaaccccatataaaaagatgaactggcggcttcacacactcacaccatgtttaggtaaacgaaagctgngtcttacttgatttattcttt

SEQ ID NO: 4329 - DNA, 238 bp, Homo sapiens
aaaagtttttggtttacaaaaagcatgtataaaaatacctgttcagacaaacaaagatctgatcattacattgcccagctttaagaatgccaaaaataactaaaatactgtcaatcaaatgagagggctacatgggtttattaaagtttattttaacaattttagctaagcagaatgtgctaatgtaattcaagttacagttactgccagataacataagagaaaacattgtgtgtgg

SEQ ID NO: 4330 - DNA, 423 bp, Homo sapiens
ccaatgttgacaataacaacggatgggactcctggaattccatctgggattatggaaatggctttgctgcaaccagactctttcaaaagaagacatgcattgtgcacaaaatgaacaaggaagtcatgccctccattcaatcccttgatgcactggtcaaggaaaagaagcttcagggtaagggaccaggaggaccacctcccaagggcctgatgtactcagtcaacccaaacaaagtcgatgacctgagcaagttcggaaaaaacattgcaaacatgtgtcgcgggattccaacatacatggctgaggagatgcaagaggcaagcctgtttttttactcaggaacgtgctacacgaccagtgtactatggattgtggacatttccttctgtggagacacggtggagaactaaacaatttttt

SEQ ID NO: 4331 - DNA, 186 bp, Homo sapiens
  misc_feature 81: n = A,T,C or G
cttttttttttttttttttttttttttttttaatatcgatctcttttaatttttaggccaattttgagtagtcaaagtcanagcagtcaatctgtgttgtgagccgaggcacagctgcaaaagcgtgtctgaggtgtccggtggaggtggcagccgagctctgggactaatcaccgtgctggggat

SEQ ID NO: 4332 - DNA, 144 bp, Homo sapiens
aaatgcattgtgtaggcaaaaaggaatgccccagatttccatgttccaaggttttttgtttgtttgttgttcttgtttttttttgtttttgttttgctgaacaccaggggttccctggccgtgtgtggatgggttgtcagggct

SEQ ID NO: 4333 - DNA, 301 bp, Homo sapiens
  misc_feature 43: n = A,T,C or G
ctgcaaagtaccacacatagcagaaagacagaaatttatactngggggttggaagatatggctactgagtctgtaattccatttggaggttcaaaaaaccatttttacattgctattatttgtacagaccaagggacctaaattttgaaacagctagacagtgatataaacaaacatttatctctgggggtagaaaattaattataatacaagaatgaaaatgggcaaacagtatggaaggcacccacacctcctagcaccctttggttttctgatggagttctcacttcacacatcagtg

SEQ ID NO: 4334 - DNA, 534 bp, Homo sapiens
  misc_feature 501: n = A,T,C or G
aaatccagaactactttttatcttctgatatcatagaaacaatgtcattgtaaacttcttgaggggcatccattgcccagataaagtccaagtgattgtaaaaaggaatctccttgtggtaaataagattggggagttttggaagcaaaaggccaacatcttgggggtcagccaacaggtccttgccaccgttccacactgcaattggtacattcatggctgtcacattgtagtagggaggctgggactgatcatagtgcatcctattctgaactgggcttccccagtcataagcttggaatttcccagacttaacagcctgggtccaatggaacatgttttgaacagaagttcctgctggattatgtgatagatacacatccaagcgactcgtgttaaagttcttactgtcaaatccacaaattataaataaggcattgctgcaaaggagattcagcatctcacgggagcacacttcagtagcaagaaattgatcaaagnagttgtgtgggtagaatattttgtcaccaaata

SEQ ID NO: 4335 - DNA, 422 bp, Homo sapiens
ccaatgttgacaataacaacggatgggactcctggaattccatctgggattatggaaatggctttgctgcaaccagactctttcaaaagaagacatgcattgtgcacaaaatgaacaaggaagtcatgccctccattcaatcccttgatgcactggtcaaggaaaagaagcttcagggtaagggaccaggaggaccacctcccaagggcctgatgtactcagtcaacccaaacaaagtcgatgacctgagcaagttcggaaaaaacattgcaaacatgtgtcgtgggattccaacatacatggctgaggagatgcaagaggcaagcctgtttttttactcaggaacgtgctacacgaccagtgtactatggattgtggacatttccttctgtggagacacggtggagaactaaacaattttt

SEQ ID NO: 4336 - DNA, 167 bp, Homo sapiens
  misc_feature 77, 90: n = A,T,C or G
caagctttttttttttttttttttttttttgctaaatgattttattgaaacttaaagaaatcaaacataactagtanagaaaaatttcanaatgacatggtaaaaaccactggagcccatattttttctgcacagcatattcagatgactaaatccatagtggcttt

SEQ ID NO: 4337 - DNA, 371 bp, Homo sapiens
aaaccaagtattgctacaatatttccagatactcattcctcataaaaatctaaattaccatgattacaaacatatcatgagttatgatctattttttataggaacaacattcaagttatttcacataaaacagcactttaatagcgttttacttttatgaaaatagataactcatttcaaaatagaaataaaatgtctgtacgtggggaccaaaattaataaaacatgttttacgtaactctttggtgtgttatttttattaatacctgcttatatcataccccaaactgatctttacaggaaaaacaccaacatggaagattctcccttttcctacagccttcacgagatttttcagagtagcatatttt

SEQ ID NO: 4338 - DNA, 565 bp, Homo sapiens
  misc_feature 416, 418, 556: n = A,T,C or G
tttcaaagcacctctgtcaagagcccaaaaactgtgtccccacctatcaggaaaggctggagcatgtcagagcagagtgaagagtctgtgggtggaagagttgcagaaaggaaacaagtggaaaatgccaaggcttctaagaagaatgggaatgtgggaaaaacaacctggcaaaacaaagaatctaaaggagagacagggaagagaagtaaggaaggtcatagtttggagatggagaatgagaatcttgtagaaaatggtgcagactccgatgaagatgataacagcttcctcaaacaacaatctccacaagaacccaagtctctgaattggtcgagttttgtagacaacacctttgctgaagaattcactactcagaatcagaaatcccaggatgtggaactctgggagggagnangtggtcaaagagctctctgtggaagaacagataaagagaaatcggtattatgatgaggatgaggatgaagagtgacaaattgcaatgatgctgggccttaaattcatgttagtgttagcgagccactgccctttgtcnaaatgtgat

SEQ ID NO: 4339 - DNA, 423 bp, Homo sapiens
  misc_feature 9, 19, 21, 46, 64, 65, 76, 82, 124, 157, 174: n = A,T,C or G
ccaatgttnacaataacancngatgggactcctggaattccatctnggattatggaaatggctnngctgcaaccanactctntcaaaagaagacatgcattgtgcacaaaatgaacaaggaagncatgccctccattcaatcccttgatgcactggncaaggaaaagaagcttnagggtaagagaccaggaggaccacctcccaagggcctgatgtactcagtcaacccaaacaaagtcgatgacctgagcaagttcggaaaaaacattgcaaacatgtgtcgtgggattccaacatacatggctgaggagatgcaagaggcaagcctgtttttttactcaggaacgtgctacacgaccagtgtactatggattgtggacatttccttctgtggagacacggtggagaactaaacaatttttt

SEQ ID NO: 4340 - DNA, 504 bp, Homo sapiens
  misc_feature 248, 411, 413, 414: n = A,T,C or G
aaagtttctctagggtccccctgagcaaaagagcgtccgttcagttggttgggggctcaggattttattttccattctcaagatcgaaaaaaaggtgtgattataaaggaatgggacaaattatcttatttgtgttgtaacttggtaattccaaaaaagaagttccaagaaagagagggacactggctactgaataggagctagaggaccagatagatagtggaagagggggagccattgtggtgggnggtagaagtgtaaaggaggcaggcatcctaggtaactgtcttgtggctttcacttcccaggtgcatgtccgttccgaggaatgggatttaatgacctttgatgccaacccatatgacagcgtgaaaaaaatcaaagaacatgtccggtctaagaccaaggttncnngtgcaggaccaggttcttttgctaggctccaagatcttaaagccacggagaagcctctcatcttatggcattgacaaagagaagaccatc

SEQ ID NO: 4341 - DNA, 358 bp, Homo sapiens
ccgttgatgcaggatatcggcacattgactgtgcctatgtctatcagaatgaacatgaagtgggggaagccatccaagagaagatccaagagaaggctgtgaagcgggaggaggaagaagaggaaggaagaagaaaggagaagaaaaaaagaagaaaaggaagaagaaggagaagaagaagagaaggagaggaggaagaagaactaagaaggaagagaagaaggagaaggagaagaaaaggagaactaagaaggaagaagaaaggaaaagaaggagaagaagaaagaactaagaagacgaaggagaggaagaagaagaaaagaaagaagaaagaataataaggaacaagaagaaagag

SEQ ID NO: 4342 - DNA, 308 bp, Homo sapiens
  misc_feature 54: n = A,T,C or G
gtttccaccccctcccaaagcaagagtcggatcagtgcgtcatggaggtctcanaccgaagaaactgtggctacccgggcatcagccccgaggaatgcgcctctcggaagtgctgcttctccaacttcatctttgaagtgccctggtgcttcttcccgaagtctgtggaagactgccattactaagagaggctggttccagaggatgcatctggctcaccgggtgttccgaaaccaaagaagaaacttcgccttatcagcttcatacttcatgaaatcctggttttcttaaccatcttttcctcattt

SEQ ID NO: 4343 - DNA, 261 bp, Homo sapiens
ctgcagaagcgtgtctgaggtgtccggtggaggtggcagccgagctctgggactaatcaccgtgctggggacggcaccgcgtcaggatgcaggcagatccctgcagaagtgtctaaaattcacactcctcttctggagggacgtcgatggtattaggatagaagcaccaggggaccccacgaacggtgtcgtcgaaacagcagcccttatttgcacactgggagggcgtgacaccaggaaaaccacaattctgtctttcac

SEQ ID NO: 4344 - DNA, 540 bp, Homo sapiens
  misc_feature 1, 535, 538: n = A,T,C or G
ngcaattttagttcaatatttgttactgttatctatctgctgtatatggaattcttttaattcaaacgctgaaaacgaatcagcatttagtcttgccaggcacacccaataatcagtcatgtgtaatatgcacaagtttgtttttgtttttgttttttttgttggttggtttgtttttttgctttaagttgcatgatctttctgcaggaaatagtcactcatcccactccacataaggggtttagtaagagaagtctgtctatctgatgatggatagggggcaaatctttttcccctttctgttaatagtcatcacatttctatgccaaacaggaacgatccataactttagtcttaatgtacacattgcattttgataaaattaattttgttgtttcctttgaggttgatcgttgtgttgttgttttgctgcactttttacttttttgcgtgtggagctgtattcccgagaccaacgaagcgttgggatacttcattaaatgtagcgactgtcaacagcgtgcaggttttctgnttnct

SEQ ID NO: 4345 - DNA, 542 bp, Homo sapiens
ccatttgtctttcctagaatagcataactttgttcattgttttttttgtttgtctttctgacacagaaagactgatgatggtgtccactatgtattcttcaaaacatttggcacatgctgcactaacctagtctatcttttctatcttggaatttgctcatacaaaccctatagcctagactagatcccttaccctctctccagttcctatcattcacccatttcactgtgcaagacacctcactagtcaccagtgatacagaaatgacttttaagcagtttctgctcttaagggcttaccgttttgtctataagatacacaagtataaatgacaagtacaaataacaatgaatgtttaatgctttacgtttagtgtttaagcttgttgttggaagagcagcattttgacccttggagaagaaaaactagctgtggcattccaggtggagaacctgacagaggactaagaagttatctaatgtaaaagacctcaggcaccaccttcgcataaactttttccagacaaggctaaatgtgcatg

SEQ ID NO: 4346 - DNA, 315 bp, Homo sapiens
agcgtggtcgcggccgaggtactccacaaaacactacagacagtaacaaaataattcaataaatattaaaaactttcaatagaattataggacacttttttatcatatgtgagcatcaacaatgccacagccattagatatactattaaacacagtcatagatatctttcttgaataatggacataataaattttttatcaaggagtcataacatttacacatatccatacacaagataacagctcagaggaaatgaagcagactccccagtgacctggtttcatctgcctgtacctgcccgggcggccgctcga

SEQ ID NO: 4347 - DNA, 309 bp, Homo sapiens
ggccgcccgggcaggtacaggcagatgaaaccaggtcgctggggagtctgcttcatttcctctgagctgttatcttgtgtatggatatgtgtaaatgttatgactccttgataaaaaatttattatgtccattattcaagaaagatatctatgactgtgtttaatagtatatctaatggctgtggcattgttgatgctcacatatgataaaaaagtgtcctataattctattgaaagtttttaatatttattgaattattttgttactgtctgtagtgttttgtggagtacctcggccgcgaccacgct

SEQ ID NO: 4348 - DNA, 314 bp, Homo sapiens
agcgtggtcgcggccgaggtactccacaaaacactacagacagtaacaaaataattcaataaatattaaaaactttcaatagaattataggacacttttttatcatatgtgagcatcaacaatgccacagccattagatatactattaaacacagtcatagatatctttcttgaataatggacataataaattttttatcaaggagtcataacatttacacatatccatacacaagataatagctcagaggaaatgaagcagactccccagtgacctggtttcatctgcctgtacctgcccgggcggcgctcga

SEQ ID NO: 4349 - DNA, 309 bp, Homo sapiens
  misc_feature 39: n = A,T,C or G
tccgcccgggcaggtacaggcagatgaaaccaggtcacntggggagtctgcttcatttcctctgagctgttatcttgtgtatggatatgtgtaaatgttatgactccttgataaaaaatttattatgtccattattcaagaaagatatctatgactgtgtttaatagtatatctaatggctgtggcattgttgatgctcacatatgataaaaaagtgtcctataattctattgaaagtttttaatatttattgaattattttgttactgtctgtagtgttttgtggagtacctcggccgcgaccacgct

SEQ ID NO: 4350 - DNA, 262 bp, Homo sapiens
cgagcggccgcccgggcaggtattctattgaaagttttttatcatatgtgagcatcaacaatgccacagccattagatatactattaaacacagtcatagatatctttcttgaataatggacataataaattttttatcaaggagtcataacatttacacatatccatacacaagataacagctcagaggaaatgaagcagactccccagtgacctggtttcatctgcctgtacctcggccgacctcggccgcgaccacgct

SEQ ID NO: 4351 - DNA, 506 bp, Homo sapiens
cagcgtggtcgcggccgaggtactatctggtttgagagtgcccttgaaaatttcatactgcttagagtttcctttatttccgaacaaagaaactagtatgtgtcctgtaaccttttttccagacagtgtgacagataccttatacctccaacgtgcaaaattactggcatcaccagtgtctagataaaatttctggcccacatcatttgttttcccaggatatctatcagcatagtgacccatctgtgggcagcctccacttggacaagggaaacacttgtttgcagtgaagacgttgtaagaggcacaggggaatccagcaaagccatcagggttgacgatgctatcagtgtaatatttgtagcttcttaagtgattacaggccgcaaagtctcgagtcccttcccagattccgtctatgtccacaatctgagagagaatgttctttttacatccaggcatttccactcctccatttggaaagaaatctaggtggcccacgactt

SEQ ID NO: 4352 - DNA, 585 bp, Homo sapiens
agcgtggtcgcggccgaggtactatctggtttgagagtgcccttgaaaatttcatactgcttagagtttcctttatttccgaacaaagaaactagtatgtgtcctgtaaccttttttccagacagtgtgacagataccttatacctccaacgtgcaaaattactggcatcaccagtgtctagataaaatttctggcccacatcatttgttttcccaggatatctatcagcatagtgacccatctgtgggcagcctccacttggacaagggaaacacttgtttgcagtgaagacgttgtaagaggcacaggggaatccagcaaagccatcagggttgacgatgctatcagtgtaatatttgtagcttcttaagtgattacaggccgcaaagtctcgagtcccttcccagattccgtctatgtccacaatctgagagagaatgttctttttacatccaggcatttccactcctccatttggaaagaaatctaggtggcccacgacttggctcattccaaaccccaaattggggactatgggggcaccatccgtgtgaattacatccacaaatttggcatcgctgggg

SEQ ID NO: 4353 - DNA, 669 bp, Homo sapiens
  misc_feature 631: n = A,T,C or G
agcgtggtcgcggccgaggtactatctggtttgagagtgcccttgaaaatttcatactgcttagagtttcctttatttccgaacaaagaaactagtatgtgtcctgtaaccttttttccagacagtgtgacagataccttatacctccaacgtgcaaaattactggcatcaccagtgtctagataaaatttctggcccacatcatttgttttcccaggatatctatcagcatagtgacccatctgtgggcagcctccacttggacaagggaaacacttgtttgcagtgaagacgttgtaagaggcacaggggaatccagcaaagccatcagggttgacgatgctatcagtgtaatatttgtagcttcttaagtgattacaggccgcaaagtctcgagtcccttcccagattccgtctatgtccacaatctgagagagaatgttctttttacatccaggcatttccactcctccatttggaaagaaatctaggtggcccacgacttggctcattccaaaccccaaattggggactatgggggcaccatccgtgtgaattacatccacaaatttggcatcgctggggtccaatcggactaattcaggtgtgccctgaaagcaaggttctgctnggtccaaccctgtgatgcgtccawggtcccattggttc

SEQ ID NO: 4354 - DNA, 273 bp, Homo sapiens
tcgagcggccgcccgggcaggtactgcctatttggggtatcatcattcttcgggggccccacagggaaccttttgctcaccggggccagcttgtcagtctcctgagagctgccttgattcaaatgctctttgatggcctgctcaatttgttcctcttcctgcaggtcatcttcagatgagccttgaccaggaactcgcttcacttggtttgaattaatgatctcagggtatttaactagcatcctggccaagtacctcggccgcgaccacgct

SEQ ID NO: 4355 - DNA, 262 bp, Homo sapiens
tcgagcggccgcccgggcaggtacttggccaggatgctagttaaataccctgagatcattaattcaaaccaagtgaagcgagttcctggtcaaggctcatctgaagatgacctgcaggaagaggaacaaattgagcaggccatcaaagagcatttgaatcaaggcagctctcaggagactgacaagctggccccggtgagcaaaaggttccctgtggggcccccgaagaatgatgataccccacctcggccgcgaccacgct

SEQ ID NO: 4356 - DNA, 477 bp, Homo sapiens
agcgtggtcgcggccgaggtacagccttgtgccatggcacacagtcacagaaacatagcaagcccttgaaatcaggctttctgactttgtctaatctcctgctttagcaaagacatcaattctccctccttttatttaaatggtggctgggtccctgacaaggtatgttcctgcccacagggtttcacatttggcaaagctggagagatcctcaccaagcggctccgatacatggttttccgatccatgctcagacaggatgtgagttggtttgatgaccctaaaaacaccactggagcattgactaccaggctcgccaatgatgctgctcaagttaaaggggctataggttccaggcttgctgtaattacccagaatatagcaaatcttgggacaggaataattatatccttcatctatggttggcaactaacactgttactcttagcaattgtacctgcccgggcggccgctcga

SEQ ID NO: 4357 - DNA, 265 bp, Homo sapiens
agcgtggtcgcggccgaggtacaggaaaacagtagaaatgtctaatttaatttaaagatcaatagacaaatgaaacgtaaaaacaaaatactatgtagcctgtttttactaaattgttgattttttaattgctttatgagcctgttttgcctaaagtgtctatagatctttaactttaaagtcttatctcactttctttagtattgcagaaaaacttaagagtttttctgtttgcttttgtgtacctgcccgggcggccgctcga

SEQ ID NO: 4358 - DNA, 345 bp, Homo sapiens
agcgtggtcgcggccgaggtacttcagctgacagagagattcagagaacgttaatggagttactgaatcaaatggatggatttgatactctgcatagagttaaaatgatcatggctacaaacagaccagatacactggatcctgctttgctgcgtccaggaagattagatagaaaaatacatattgatttgccaaatgaacaagcaagattagacatactgaaaatccatgcaggtcccattacaaagcatggtgaaatagattatgaagcaattgtgaagctttcggatggctttaatggagcagatctgagaaatgtttgtacctgcccgggcggccgctcga

SEQ ID NO: 4359 - DNA, 349 bp, Homo sapiens
agcgtggtcgcggccgaggtacagtattttttaaggcaaataaagatgattagctcaccttgagataacaatcaggtaagatcataacaatgtctcatgatgtaaaaaatattaaagatatcaatactaagtgacagtatcactctaatataatatggatcagagcatttattttggggaggaaaacagtggtgattaccggcattttattaaacttaaaactttgtagaaagcaaacaaaattgttcttgggagaaaatcaacttttagattaaaaaaattttaagtatctaggagtatttaaatccttttcccataaataaaagtacctgcccgggcggccgctcga

SEQ ID NO: 4360 - DNA, 464 bp, Homo sapiens
agcgtggtcgcggccgaggtactatctggctgcagagactttcttaggtcccgtgttagaccccatggggtctcagcatgtggtcatgtggtaatgcattcctttcaaaggctttgggttgaactcaagttggaaatacctggaaaagaccaagcttctcctttgggtgtctgcggatcctattaaaaatattcgtgatgttttaagttctccaatacaagtttctccatgaaaacaagcatcagatacattacctctaagtatttattggaggggttccaacagcctcgtggacaggccttctcagcagctactgagtgccccctaggggtggggaggggccagtgcacatggaggcaaaccacagagcccttttgtggcctattattatgaagaactaaaatgtggccagtgaaccagtcagtgctcatcactacggggtacctgcccgggcggccgctcga

SEQ ID NO: 4361 - DNA, 513 bp, Homo sapiens
agcgtggtcgcggccgaggtacagtaatttgcctcataagcataggagcattgggaatgagagggaactgtgcccagtatactgttttttttcttcctccaataaaagtggtgtagtgccgaaagtgctaaaatatttagtgcggtattgctctgtgaattcaagttcaacagacttcactttggtcatgtttattaaaccaccagtgacatttaaaaatatatttttagcagtcgtaatgttagtcaccaagggaaggtggtggaatgtctatgtttttgattttactgtgagttaaaaaggcacatttctaccttctattgtttttaaattcaagaatagggaattagttcctggtgttgtttacgagtgtattctcgtgtcaacatacagggatttagacatttaactctctgtgccttgataagaatatcatttagagtgtagatacttttgcctttttaaaaagccattattttatgagacttagtacctgcccgggcggccgctcga

SEQ ID NO: 4362 - DNA, 452 bp, Homo sapiens
agcgtggtcgcggccgaggtaccaatttggatgaattcttgatagatttaaatagtgtatgtaattttgtaatgcttagactcttgaagagctactttctgttttaatgttaagattcttgtgtcttagttttttttaacatggatgtaattccatgtaaacaggtatggaagtaggaaatgtttaggctggacttggtggattattaattgactttcttgggttcttgggagtcaacattactaaagcagtgtgaatccctgtttgcttcagggcgagatgtgtgacagaggtggcatcaagctcttacagtcccaaccctccaacggaaatgggcgaagatctcaggaatggcatcggtcacaggaaatcgatagtggctggctgctagcatggccacttggggcttaggcagaaatagagccatggtacctgcccgggcggccgctcga

SEQ ID NO: 4363 - DNA, 285 bp, Homo sapiens
ctaatacgactcactatagggctcgagcggccgcccgggcaggtacgagtcctccaggtaaatattacacaaatgggaagcatcttgaatttttaagtatatttcaatacataaatttttatgcatgctttaaacaaacagtattttttttaaatgagagaatctaacaaaaaaagtctgaccagcaccagcatttaaattttctgattttaatattagtctgacatagcgttagtaaccatgctgcactgaaacatgtaatggtacctcggccgcgaccacgct

SEQ ID NO: 4364 - DNA, 263 bp, Homo sapiens
tcgagcggccgcccgggcaggtacaaattatttggctcgacttctagtttttgtcttatttcaggcagctctgtccagtggagtgacccgttgccagagtgcagagaaatttattgtccagcaccaccacaaattgacaatggaataattcaaggggaacgtgaccattatggatatagacagtctgtaacgtatgcatgtaataaaggattcaccatgattggagagcactctatttattgtacctcggccgcgaccacgct

SEQ ID NO: 4365 - DNA, 422 bp, Homo sapiens
tcgagcggccgcccgggcaggtacatatgtctatcagagcttttattgttctctattacatgcttgcttgctttactcactaaaaattcagttcgtagagatcagctgtctcatatctacattcttggtccatacaatctacagagtcaagtagtgctttatacttgctgatatagtaaagtcactggcttttagtgagagtggaaatcagcacccataatgttctctgttatacctaggtttctttaaacatttcagttaaggtcttagatattactactacacctcatgactggagcgaatactaaaattattcataaatgggcacaaatatgtttactgtttatactagccactaacattattaagtgcttactatgtgtctggtgcttacatacatgtacctcggccgcgaccacgct

SEQ ID NO: 4366 - DNA, 401 bp, Homo sapiens
agcgtggtcgcggccgaggtacgagagtgtagccaaagtgagaggctgagagcaaaggagacatttttttcagttttgagtcgagtatccagacagaggcaaatcattttgtttaactttttattaaagtgtaactatagaaacacatcaatgatttttcacaagtggagcacgtgcatacaatcggcaccccagaagccccccgtcagattcccttccagttaactacctctccaagggaaaccactatcctgagttctaagcgcatagattagttctgtctggtttggggagatatataaatggaattatgcattcttcgtatctggtttcttttcaccaatattatgtttgtgagatttttgttgcatgtatttgtacctgcccgggcggccgctcga

SEQ ID NO: 4367 - DNA, 307 bp, Homo sapiens
tcgagcggccgcccgggcaggtacatctgtcactccactgaaagggacctagtcactttaaagaggccttttatctcagcacgagatatccaagcgtgaatgctaaggcttgatgtttccattaggatttagcattcgagatttcagattttatttatagtcattgatgtgttttgctgtattataacacatttaaagggaaattttattatggtttttacatgtagtcatttcataaaaatatccagataggtaaatggaagaaaatagtagattttagtcatggtacctcggccgcgaccacgct

SEQ ID NO: 4368 - DNA, 256 bp, Homo sapiens
tcgagcggccgcccgggcaggtacaaagcgatcagacacaaattcacgggcagaaatggcgagtctcgggcagtcaagaagaagtcctaatcttaggatggctagacagttaccaggagcaagtcttttctgaagataagaaacgcagacagtaaacactgaggggatctgaaagcggctggccaatgcaaaaatatcttgcacatttccgtcattgagatcaatactggcagagtacctcggccgcgaccacgct

SEQ ID NO: 4369 - DNA, 343 bp, Homo sapiens
tcgagcggccgcccgggcaggtacaatgtgatgttgatatatgtttaaaatgtggaatgattaaatcaggctaatttacttttttttttctaaaaggaccttggcttcagaattaactttaattttcattccactttgcttatattatcttggcaagatcagtcctttgtagcaaggccaggatttaagctttgaaccaccagtaaggagggcattggtttgagcctgctttcaattttgtccaaaatccagttattcgtattttacctagttcccagtaactcacaatacaatccaagaatgtgccttattgctggcctggtacctcggccgcgaccacgct

SEQ ID NO: 4370 - DNA, 358 bp, Homo sapiens
tcgagcggccgcccgggcaggtacacagaaccttcttcactcccaacaacaaagttgttgacatctccaacagggaaggacatagatgtcacagctactgcttttgactgtttatgaaccaactccatgctatcctgtggatgggaaagcatgtccagactccatgaacaaatttttccatcagtagagatgctaatcagattgtgagcattttgtgttccaacaacatttacacaatatacagggtgtgtgtgtgcagctgctgacagtggagttctttgcactggagttcttttattgctacggttatcccaaagcacaatttggcctgaatatgtacctcggccgcgaccacgct

SEQ ID NO: 4371 - DNA, 237 bp, Homo sapiens
agcgtggtcgcggccgaggtactatggatgcttccgagagggggcgactattatacaagttggctgatttaatcgaaacagatcgtctgctgctggcgacaatggagtcaatgaatggtggaaaactctattccaatgcatatctgaatgatttagcaggctgcatcaaaacattgcgctactgtgcaggttgggctgacaagatccagggccgtacctgcccgggcggccgctcga

SEQ ID NO: 4372 - DNA, 414 bp, Homo sapiens
tcgagcggccgcccgggcaggtaccattttgtaaaaggaatattattattattatttttaattatttggtaaatattttgtcatatgaccttctgaagcagccacaacttagataatgtcagaactaaggtgatttttttttttttttaattttgaaagcccagccaaaatgaggtgtgaatttgtcatactgttacattgaaattggtaacaaaatatatcccctcccatttggacttttagggtaaatgaaaattttattgtattttaaagtagtttctaagtgttagcaagactgactataattccagtttctgttttctatggacagacctgataaactggagaccctaaagcaggaatacccaaattatagtgtcaggattttagctgtacctcggccgcgaccacgct

SEQ ID NO: 4373 - DNA, 436 bp, Homo sapiens
agcgtggtcgcggccgaggtacgcgaaattgtgttatgactgatagccttcagctacaaaaagataggactgacctggtttaaagtgttctattttgtaaatcattccatttgagtctttctgatgaacttggctatactgaaatctgttattttagtgaggctccaaaatgagcaaagctaggcctgattagagtagagtgactattaaaaaacataactttctaggagctataaatcaaagttttaaaaagatgtttggatatatttgagtattccgatcatgaaaacagaaattgccctgcctactacaaggacagactgatgggaaattatgcacctggtcaacttagcttttaagcagacgatgctgtaaaaactaacggcttctctgatatttattgtaagttttagtacctgcccgggcggccgctcga

SEQ ID NO: 4374 - DNA, 373 bp, Homo sapiens
agcgtggtcgcggccgaggtacctatggacgtgagatccaagtgacagagcttctcgacaagttagacttttatgtcctgcctgtgctcaatattgatggctacatctacacctggaccaagagccgattttggagaaagactcgctccacccatactggatctagctgcattggcacagaccccaacagaaattttgatgctggttggtgtgaaattggagcctctcgaaacccctgtgatgaaacttactgtggacctgccgcagagtctgaaaaggagaccaaggccctggctgatttcatccgcaacaaactctcttccatcaaggcatatctgacaatccactcgtacctgcccgggcggccgctcga

SEQ ID NO: 4375 - DNA, 514 bp, Homo sapiens
tcgagcggccgcccgggcaggtaccctcgctccagggtgctggctgagtagatccagtattcattccctgcaaagaacacagccttctcctcctgtggggcctcgtataccgcatcaatcttttccgggagctcaggccagaatgtggccaccagcaggggccccatgggcttgtcacgtggcgtcacagtccgccaaatgaaccggtccttgaagaagaagatctcaccacggatctgagcgatgccatcaaatacaatgccctgtttgcagatctcaggagtgacagggcccagcgtgggggtggggccggtgccaaggtcaatgtcaggagaggccccatagagctcctgaatgcccttgatgtcatcctgggacagacggaagttcttggtgtaggtgtaaatgggtgccatcagggccccagggtctttgggagtgctccagccccatggcgtggccaaactcgtgggctgccacgaggaacaggctgtacctcggccgcgaccacgct

SEQ ID NO: 4376 - DNA, 518 bp, Homo sapiens
cgagcggccgcccgggcaggtacataggtagttttggccccaggaattccccttctgggaatatgccttaaaaaaagactgagcatatttttaaaaacatatatgaatgtaaggagagctatcacagcacactattgaaaacactacaaacactgaaccagtccatagcaggtcacttggaagacctgaagggaaagagaataggagcttcaacagaggcgatccggatccaaaggaaccactgggtgctgtgcggttacgtctgaggccatcacccgctgcagagccaagcctgcggcgactgggaggtgaggtgagcgctcatcaaacccagctcccacacagaacgtccgtgagtgtctgattcacacagggttcatgcagtgtgtcactccctggcatctacactcctctttgctaaactcaaatgcacccctgatcagtaaaaactattttaatacaccccctaaatatgtgtattattacacctatgaatgtacctcggccgcgaccacgct

SEQ ID NO: 4377 - DNA, 387 bp, Homo sapiens
tcgagcggccgcccgggcaggtaccttccccagcttcttcacagaggtgtaagttttggtttgtttacctcctattacctcatggagaagtagaggttttaaaactcaaaaagtgggcagagaaagatattatgctaagcaaggaaggtaattgttatccccacttttcagatgaagaaagagtcagagagtttaagtgacttgcgcacaatcacattacaaatagttagtggaactaggaccacaagcaaggtcttctgaatcctacatcacagggcagatctcattttcaacttaggcatatttcaaaagtagtagaaagtttaatttagaatatgtctagtgattccccacttcctaaactggtacctcggccgcgaccacgct

SEQ ID NO: 4378 - DNA, 401 bp, Homo sapiens
cgagcggccgcccgggcaggtacacattggaatttgaatgcagtggccaggacagcagcttataaaccaccttataggtaggtaagcaacccacgggattccctcggctgggctggggatggggagggggcagtggacaggaagcgggcagggcctgaggaccctgttctttaataggccacaacagggctcagctcctctcagaacttttgctacaatcagagttaagaccagatacatgctacctaaggccatgaacttgacaatatctgctccagagaagccctgaaccctcgccctaggtccccatgatttaaacccaatggtaagcccaagtctcacctttctaaatattctgtttatcagttaagcttattatgtacctcggccgcgaccacgct

SEQ ID NO: 4379 - DNA, 361 bp, Homo sapiens
agcgtggtcgcggccgaggtacgtagaatgtttcaccctggccggggattaggaggtcctcgtgctcgtagatcaaacatgcactttactagcagttctactggtggactttcttcttctcagagttcatattctccaagcaatagggaagccatggatcctatagctgagcttttatctcagttatcaggagtgagacgttctgcaggaggacagcttaattcctctggcccttccgcttctcagttacaacaactgcagatgcagctgcagctagaacggcagcatgccctggcagcacggcaacaactggagaccgcacgcaacgcaacccggcgtacctgcccgggcggccgctcga

SEQ ID NO: 4380 - DNA, 441 bp, Homo sapiens
tcgagcggccgcccgggcaggtaccacttttatcacaatggccttgcaaaggccaagagaagacgcagcctacaccacaagcagcagctggagagagaccccagggtaaagatggctttgcagcaggaaggatttgaccgaaaaaagcgaggttacagagacatcaatgagatcgacatcaacatgaacgatcctctttttacaaagcagtggtatctgatcaatactgggcaagctgatggcactcctggccttgatttgaatgtggctgaagcctgggagctgggatacacagggaaaggtgttaccattggaattatggatgatgggattgactatctctacccggacctggcctccaactataatgccgaagcaagttacgacttcagcagcaacgacccctatccttaccctcggtacctcggccgcgaccacgct

SEQ ID NO: 4381 - DNA, 466 bp, Homo sapiens
agcgtggtcgcggccgaggtacctgtcacacatcttgaaaaataaaacgataatagaactagtgactaattttcccttacagttcctgcttggtcccacccactgaagtagctcatcgtagtgcgggccgtattagaagcagtggggtactttgtgaagggagatgaaaggacgtttaaagtatatatattttgttgagaggaaagaagataaaactatgccagttttatatcaatagcttgtagaagctcagctcttcttggtcttggctagactgcctagattcccacagcagacaaggttgagaatccattgctggaatcttggtattgatgagttacagtgatggaacatgtgcttggccacaggcaggtccagtcactgcaaaagtgaccaagccagcaggtcacccttaacttcagaacaattattggtggtgaactgtacctgcccgggcggccgctcg

SEQ ID NO: 4382 - DNA, 455 bp, Homo sapiens
cgagcggccgcccgggcaggtaccagaagcaccagtttcctgtggcaaacagaattattcctgctgtatttgtaatttggtgccacgaggtagcccagatcccttcagctctgatggaagagcattgcttcagccgtaaatggacacctgcagaaaccttgcaccgatggatagtctccctcagctccgtgccatcgctgcaggggctgttatggacatcactgcagcccagtggctctctctcctggtctccaccatatgagttggcttctgtttctctcctgttttactttgcctttagctgtggtctttcaaaccaccatccctccttatcttcctctgctggttcctcagatcttcctctgatggcgctgcctccatgccatgccctctgccagttctatgtggtgaacagtgagctgtcctgccagctgtacctcggccgcgaccacgct

SEQ ID NO: 4383 - DNA, 373 bp, Homo sapiens
cgagcggccgcccgggcaggtaccaggttccccctgacattacaaaaatgcatgactaacaatataatttcaaattcaagataaagaatagtctgttaagttagaaggatgtccctttatcagaaacactgggagttgatgcatttatttttctttaaaacagttcatctttaaaagcatgattgctctgttttgctgacatgcatacttatcttaaaaagaaggaggtgggcaaagaaaaaatttaccctaagaatctaatagaatcagtttgtaggattttagattttatgatgaatatgtgacttaaagacatgtccaagttagttacatgggcttcttaaaaccactgtacctcggccgcgaccacgct

SEQ ID NO: 4384 - DNA, 290 bp, Homo sapiens
agcgtggtcgcggccgaggtacaagtggttttagtgaagaagtcttatattacacctcaggctgtgctccttctatgccagcaagccctgtattaaccaaggctggaattatttggttatccttacaatggagtaagccctcaggaacaccatcagatgaaggaatttcttacattttagagatggaggaagaaacttcaggatatggttttaagcctaaatatgatggagaagatcttgcttacacagtgaaaaatctcagacgtagtacctgcccgggcggccgctca

SEQ ID NO: 4385 - DNA, 532 bp, Homo sapiens
agcgtggtcgcggccgaggtacacaaagggacaaggcaaatttcttttttcgtgtgggtagacttagttggcccaagtccttaaaacttttccatataaaaataaaaagtccaagaccagattatttttcttctggtcataaatgctgatttatttacaggtgccttgttcagaccaccattataaacttgggataaaatatgtgtgtattaaagcctcagcatttaatgtcagggtcctttgaagattcactcaagtgttaagacgtttctggaatgcagcgtctctcccccatagtcaacatggttattatatctgtaatctatccagaatgatagaagctaaccttccaagtaacactttgtttttaacttaaatcttttagacatgaaagactccaaaatgacttcattcttgttctaaaaccagcactggagccagctgttgaagagtggtttataaatacagttatcttgtaggctgcttatctgtttataatacagcagacacagatggcagactttgctacatg

SEQ ID NO: 4386 - DNA, 318 bp, Homo sapiens
tcgagcggccgcccgggcaggttttagaacaagaatgaagtcattttggagtctttcatgtctaaaagatttaagttaaaaacaaagtgttacttggaaggttagcttctatcattctggatagattacagatataataaccatgttgactatgggggagagacgctgcattccagaaacgtcttaacacttgagtgaatcttcaaaggaccctgacattaaatgctgaggctttaatacacacatattttatcccaagtttataatggtggtctgaacaaggcacctgtaaataaatacctcggccgcgaccacgct

SEQ ID NO: 4387 - DNA, 334 bp, Homo sapiens
agcgtggtcgcggccgaggtacttctatgggaaagtgaacagttctgtgacaggaaacatctctgtccatgccagcatagtagttgtatggacttctaaccagttgagttttttaaagcattgaggattttttcctcttaccaactcctcttcaggtttttaaagacccagcccttcccaatctcaaagagaaaaaggaaactgagttatcttgaataacataactttttaatcaaatgtttattttggcttgtggatcttggtgttatttaaaaaattgaggtgatggtcattgcaagctcatctattaagtacctgcccgggcggccgctcg

SEQ ID NO: 4388 - DNA, 257 bp, Homo sapiens
agcgtggtcgcggccgaggtacaggtgggggagctcttggtggcaggcagcaccccaggaggagtgggactcctgccgaggctgaccccaacttcaaggctgccaagttctgatgggagtgtcctcctccaggaacatctcccagccccggacgagcagagccctggaggagtgggactcctgccctgaggctgaccccagttttggggctgccgggttctgatgggagtgtcctacctgcccgggcggccgctcga

SEQ ID NO: 4389 - DNA, 504 bp, Homo sapiens
gagcggccgcccgggcaggtacattgttccgaacaaggaactctaggaaggcaacgaggcctgtcagaaagacgaccaaaaccagcagctggtgcacaaagatgtccagcatttcccggccatgagtgtggttgtagaagataaaggcctccacaaataaggcatttgacaacattaacttggttaaggacacaggaagtgaactgatggtgaaacataagatatctgccgcacccaacagcccaaagaagaaatacatggtgaaatgatgccagcccaggagttgattccagtgaccttgtttatagtcatataacatcagatggggccctccaggaataaactgctccccagccatgccagttaaagccatgccaactattgtaattccctccaaaatttccaatcgatagaataatgttttggaaccaagatagcaggttcgcttttgctttttgcagatatacttcagaatactctttgtacctcggccgcgaccacgct

SEQ ID NO: 4390 - DNA, 308 bp, Homo sapiens
agcgtggtcgcggccgaggtaccaactgcaaatatctcaatattgtttgggacagactccaaattagagtttggttaatactttcaggacttttactttcaccaccagatcattgtgatttgctagtgctttgattttcttaacacaaactccagactctttgaataagaaaaaaagtgaacttctgctgaattctttcctggatgatgcgagcccttcattttttatgttgtcatttatattctcaaatagggtaaggatattaagaagaatctctctatcccatacctgcccgggcggccgctcga

SEQ ID NO: 4391 - DNA, 471 bp, Homo sapiens
tggagcggccgcccgggcaggtacagacgagaactagagaaataccgtgacctggatgaagatgaaatccttggagccctaacagaggaagagctgaggaccctggaaaatgagctggatgagctggaccctgataatgcactgctgcctgcaggcctgaggcagaaggatcagaccaccaaggcgcccacgggcccctttaaaagagaggagctcttggatcacttggaaaagcaagcaaaggagtttaaggaccgagaagatctggtcccctacacaggggaaaaacgaggaaaggtctgggttcctaagcagaagccactggatcctgtgctggaaagtgtgacgctggaaccggagctggaggaagccttggcaaatgcttcagatgcagaactctgtgacattgcagcgatcctgggcatgcacacgctcatgagtaaccagcagtacctcggccgcgaccacgct

SEQ ID NO: 4392 - DNA, 344 bp, Homo sapiens
tcgagcggccgcccgggcaggtacaagggcagggcagggcagggaagctgccaagctccgcaccccagaggagtgttctggactacagccttatcttatggtcaaattgatacccttaataagaaaggaaaggaaaggaaaacagatcctcccctctgctttttattgtaaccagaatcaccctgaggtcccttctgaaccctctgggcctgcgctaattgtaggagccacagcgctcctagggtgagaggcttagccatccctgaccctggcagtgcactggtaagcagacactgcactgaaccaactgctatgctcagaatgtacctcggccgcgaccacgc

SEQ ID NO: 4393 - DNA, 453 bp, Homo sapiens
gagcggccgcccgggcaggtactagtgcttgccacctggtcaccagacctccaaatatggctgccaccaccaggacctttccagttactccttatatgtgtgttctatggaggggcagggaaaaggtggcacttgtgagtgtgtgtggattggcagggggcccattcactttgggttccatcttgctttaaatttcttcattttgattaagagacctctttttgatctgtattgggctaaccagagccaaatacttttgaagagtttcccagggactagtcatggtaatagcatataattgatctgaatgagatggagagaagaatgaaggggtggtggttctgggtttgatttgagttcacctgtgggcagtgggcagtgggcagtgtcttggtgaaagggaacggatactactttttgcctcaccgtaagtacctcggccgcgaccacgct

SEQ ID NO: 4394 - DNA, 334 bp, Homo sapiens
agcgtggtcgcggccgaggtacccttttttttttaatgaatagggaccaatgccacattgctttttatatttctttcttttttaatgttgccaaaaccaaaagtagctttgttttcctttgtattttgctactttgcagtatttgtgtgtgtggttttttttccttaatttgaaagggacagcactgygtatgtttataaactaaatgaagataagatattattttgtataaacattcatctgagaacaatcaaagcagtagccacatggtgctggctcctttgcagcacaaacctggtcattttgatgactgtacctgcccgggcggccgctc

SEQ ID NO: 4395 - DNA, 289 bp, Homo sapiens
agcgtggtcgcggccgaggtactatttgttttaccactgattgcactattttgtttttttaacagttgcaaagctttttaatgcataaaagtataattgaaatctgtggtatttatttacaaacatgtctacaaaaatagattacagcttattttatttttagttaaatctcttaatacacagagaactcccaatcttgctcatctaaataaggaaagacttggtgtatagtgtgatggtttagtcttaaggattaagacatttttggtacctgcccgggcggccgctc

SEQ ID NO: 4396 - DNA, 382 bp, Homo sapiens
agcgtggtcgcggccgaggtaccttattgactcgggtgctcaatacaaggatggcaccgcagatgtgacgcggacaatgcattttgggacccctacagcctacgagaaggaatgcttcacatatgtcctcaagggccacatagctgtgagtgcagccgttttcccgactggaaccaaaggtcaccttcttgactcctttgcccgttcagctttatgggattcaggcctagattacttgcacgggactggacatggtgttgggtcttttttgaatgtccatgagggtccttgcggcatcagttacaaaacattctctgatgagcccttggaggcaggcatgattgtcactgatgagcccgggtacctgcccgggcggccgctc

SEQ ID NO: 4397 - DNA, 482 bp, Homo sapiens
agcgtggtcgcggccgaggtacctgtaatctaagctgcgtattctggaactatttatttgtggtcaacagatttcagtgcattagaaagtgatgtgctgcagatgtataggtcagtttgtcaggaaaagatacccaaggtcaggaattgaatttctcaggagtttctaacaaaatgcctgcctgcctgtgaatacaaaaggagactgggaattgcccccaactggatacagtcaattcctactactttgaaataacatgtagtatagctatatataagaatacataagctcacacagagaaaaagcatggaaagagtgtcatctagaaatgataggtatgtaagaatattataagctttaaggcactacacagaggttttagtaatggaacagttaactaccatctatggtgcttaattcatacctatgttacaacctcatccagcagggctcattctagacctgcccgggcggccgctcga

SEQ ID NO: 4398 - DNA, 290 bp, Homo sapiens
agcgtggtcgcggccgaggtaccatgcgggtgatcctggaaccgttgattggagatatgcccttagttggagctttgtctatcttcttccttaggaaaccacttttagaaattgactggacaggactgacgaatcttctggatgtccctggattgaatggtttatcagatactatcattttggatataatatcaaactatctggtgcttcccaatcgaatcaccgttccacttgtcagtgaagttcaaatagctcagttgcggtttcctgtacctgcccgggcggccgct

SEQ ID NO: 4399 - DNA, 296 bp, Homo sapiens
ctcgagcggccgcccgggcaggtttttaattttttatttatttatttatttttagcaagaatgtacaattctttttgcaattttttgctaacaaaagacaaaaagaaatagtgctcccttcaatttagtagcaataaaatcatctatcttcatctctctcagagggcttagggagagtgaaaggaattagaggaacataaaccatgggtccttcaggtaaaataagtcatttcatagtgatggaggcaacagcaggctacgctcttgtctgcctgtacctcggccgcgaccacgct

SEQ ID NO: 4400 - DNA, 311 bp, Homo sapiens
tcgagcggccgcccgggcaggtgctaattgtgtggcctggttgggaggggctatttttggagcattacaagatatacttgggagccgttctgtttcaaaggaatattataatcagacgggccgtatacctgattggtgttctctcaataacccacctttggaaatgatgtttgatgtcgggaaaactcaaccacctctgatgaagagagcattttccactgagaaatagaagtttgattaaaaatcaaccttgcttcatatcaaatatttaaccaattataagcaaattgtacctcggccgcgaccacgct

SEQ ID NO: 4401 - DNA, 301 bp, Homo sapiens
agcgtggtcgcggccgaggtacgccacggagatccaatctgaaaagcctgtcttgcggccttcactgccttgtcaacatcctccttatctccttcttctacctggcagagctcctcctcagttgcaggattaaagacaggaaatttcttgccactcactgaatcatgccattcattgtttatgaagatcttagtatattgaatcttcaaatcggtgagtaggacaggtaagtctggcgtgcctgaggatgacatttctgattcggctcctggaacacagacctgcccgggcggccgctcga

SEQ ID NO: 4402 - DNA, 413 bp, Homo sapiens
agcgtggtcgcggccgaggtgcagtaggctcctcgggctgcccctcggttgacaatggtctccaggatggtctctaccatgctatctggcctactgttttggctggcatctggatggactccagcatttgcttacagcccccggacccctgaccgggtctcagaagcagatatccagagactgcttcatggtgttatggagcaattgggcattgccaggccccgagtggaatatccagctcaccaggccatgaatcttgtgggcccccagagcattgaaggtggagctcatgaaggacttcagcatttgggtccttttggcaacatccccaacatcgtggcggagttgactggagacaacattcctaaggactttagtgaggatcaggggtacctgcccgggcggccgctcga

SEQ ID NO: 4403 - DNA, 277 bp, Homo sapiens
agcgtggtcgcggccgaggtacgaagcttacagaatgttttcacatatagcatctcatctgagcctcccaacagttccgtgaggtaggtattctcacctccctttttacagacagggtaaccgaggttcagagaggtaacgggatttactcaaggccacacagctagttagtggtaaagctaggaatcgatcccagcaccccatatccaagtccagtgtttcaacaccacagctacctctgtaaagtggagcgacacctgcccgggcggccgctcga

SEQ ID NO: 4404 - DNA, 454 bp, Homo sapiens
tcgagcggccgcccgggcaggtggagcgtcgacgtatcctggaagtagaaggctttaagacagatattaaagttctccgacagaaactgaaagacttggagcaaatgttgtataaggtaattgctggtcctgaattgccacgagggagagaagaggtgtaagtgagggaacatggtcacgagggcccctgaaaagaaggatgtgctgtttccctgctggtaaacactaacagatcaccatcttcaagcctccctgaaaattagttcaagaacatgctagagggaaaataaaaagaccctgaaatcattgaacgactgcatcattcatacttcgatgtaagctaaacagattgtcatccctcctaattcaagaagtagattaaagaatcgtgtctgtcttacagttggggagggtgagtaattgagtgatagagtacctcggccgcgaccacgct

SEQ ID NO: 4405 - DNA, 216 bp, Homo sapiens
cgagcggccgcccgggcaggtacatagtgtagagggtgatgagggaggactgcaagaggccggagcgaggctggtgttcctgaatttttgggtggatcgatataatagaagccacaacgcaaaggatcaggttaatactgatgaagaacttgttttctgtgcagccatctggtttggtgtaatatgtatagagcagacctcggccgcgaccacgct

SEQ ID NO: 4406 - DNA, 426 bp, Homo sapiens
cgagcggccgcccgggcaggtcgtaacttcatattaatataagtttctttagaaaacccaagtttttaatcgtttttgttttaaggaaaaaagatttttaaaatgaatcttatgcaaaactttttgatcagtttcttttcttttgtttttttttaaaaaagacatttaaagacaaagacattatttctcatagcaggaaatgtagaggtagatggttccagtatcagcatagtgactaaactacattataaaagatccagcttccttctgtcattcccctcttttgtcttcctcagcaggttggcttttttccctggtgcctctcacttcgttggtgaccagtttcttaaactgaaagctttaatgttacatagtaaatggtagtgtgtcctgtgtaaattagtgtacctcggccgcgaccacgct

SEQ ID NO: 4407 - DNA, 534 bp, Homo sapiens
gcggccgcccgggcaggtacttggaaattgtgctgctacttaaatattgaaggaattcagaaagttgtgtatttatcttaaaatgttccttctcacttattctactggaattgaccatgaaaaagaaaatattatgccttatttatatctaattattgactgtgcaaactgtgactcagtggatatttgtatgccccccaaaaacattttaaagctgagcaatttttaataaagatgtataaataattttgattattctcattgtagttaagttactgttagtttggtgcaatacattctttccttcctcatccttttaaaattaaatatataagatgtatgttttgttttattacattaagtgctatttttaaaaaattcattgtgtgtatatgagctaatacttgatttgtttctgtatagcatgattaaagataattgaaaattttgcacttattttaggcccttggaaatttgtattctaatactttttaagaatgtccatttattttgtacctcggccgcgaccacgct

SEQ ID NO: 4408 - DNA, 280 bp, Homo sapiens
agcgtggtcgcggccgaggtaaaagtttttggtttacaaaaagcatgtataaaaatacctgttcagacaaacaaagatctgatcattacattgcccagctttaagaatgccaaaaataactaaaatactgtcaatcaaatgagagggctacatgggtttattaaagtttattttaacaattttagctaagcagaatgtgctaatgtaattcaagttacagttactgccagataacataagagaaaacattgtgtgtggacctgcccgggcggccgctcga

SEQ ID NO: 4409 - DNA, 394 bp, Homo sapiens
  misc_feature 1, 3: n = A,T,C or G
ncngagcggccgcccgggcaggtacattagcaccataacatgcgtctttaaagccttcccaaatattagtaatcttgaccagcaatgacaagaaaaaagaggagcacctttacaagcagttgatatccaatattaaaataattgtggctttaaaaatatttctttaaattcttgcattacacttttctttttaaaccaatcttccaggagattaatcaatgaaatttataagttttatcaacgtataaaatttttttcatcttctgggactcatagaatacaatctgtgtttctgaccagttgaggtagttaaaatagggagggcttttctaatttcgtatttgactatttcagaaagaaaggttatcttttacacctcggccgcgaccacgct

SEQ ID NO: 4410 - DNA, 493 bp, Homo sapiens
agcgtggtcgcggccgaggtctcttctccatcctgctggtcgtaggaggaatccagatggttctctgcgccatccaggtggtcaatggcctcctggggaccctctgtggggactgccagtgttgtggctgctgtgggggagatggacccgtttaaacctccgagatgagctgctcagactctacagcatgacgactacaatttcttttcataaaacttcttctcttcttggaattattaattcctatctgcttcctagctgataaagcttagaaaaggcagttattccttctttccaaccagctttgctcgagttagaattttgttattttcaaataaaaaatagtttggccacttaacaaatttgatttataaatctttcaaattagttcctttttagaatttaccaacaggttcaaagcatacttttcatgatttttttattacaaatgtaaaatgtataaagtcacatgtacctgcccgggcggccgctc

SEQ ID NO: 4411 - DNA, 325 bp, Homo sapiens
agcgtggtcgcggccgaggtaccccaagctggcagctctgaaccctgagtccaacacagctgggctggacatatttgccaaattttctgcctacatcaagaattcaaacccagcactcaatgacaatctggagaagggactcctgaaagccctgaaggttttagacaattacttaacatcccccctcccagaagaagtggatgaaaccagtgctgaagatgaaggtgtctctcagaggaagtttttggatggcaacgagctcaccctggctgactgcaacctgttgccaaagttacacatagtacctgcccgggcggccgytcga

SEQ ID NO: 4412 - DNA, 268 bp, Homo sapiens
tgagcggccgcccgggcaggtactgggaagcacaatgtttttgagagaaccagtctggagggcggccaggttctgcaaagggcttgattgctctgctaactgatacccaattttgatcgccacttctcatgacagaagatgctaaacatagcttctctcggatggaccatggctctgtggggccagtgcttagcagcttgtgtttgcccgttcccgtcgccatcttggccccgaagtctccaaccctgacctcggccgcgaccacgct

SEQ ID NO: 4413 - DNA, 403 bp, Homo sapiens
agcgtggtcgcggccgaggtatattacactcctatgtttgttttcaagaaagcttcattgaatcattcactaatcctaggataattaaccttttacctggattcaaggattgaggatttgatggaaagctggttgcataaaacacatgagcaaaatggatatagtgggttaagtttgctcgaaaatggatagtgtgttaagtttgctcttatttttaagtctggattcccagaggacatttaagtttgagaaataactcctagttgtggtatgttgctttcatcgtctgatgcctttgaagcacactgctttaatgcacatttactttagatttagatctcaagaaggagctctagtccttggttaggcatccaaattgtaggtacctgcccgggcggccgct

SEQ ID NO: 4414 - DNA, 532 bp, Homo sapiens
agcggccgcccgggcaggtgctactataggaagtgaccaagttcactcctggatgctagctacaagccaagccttagacactgtctggagaatggcaaaaggctttgtgatgttggcagtttcatttctggtggctgccatctgctacttccggaggctacatttatattcagggcacaagctgaaatggtggattggatatctgcagagaaaattcaaaaggaacctcagtgtggaggcagaggttgatttactcagttattgtgcaagagaatggaaaggagagacaccccgtaacaagctgatgaggaaggcttatgaggagctattttggcggcatcacattaaatgtgttcgacaagtaaggagagataactatgatgctctcagatcagtgttatttcagatattcagccagggcatctcttttccatcatggatgaaagaaaaggacattgttaagcttcctgaaaaactgctgttttcacaaggttgtaattggattcagcagtacctcggccgcgaccacgct

SEQ ID NO: 4415 - DNA, 500 bp, Homo sapiens
  misc_feature 500: n = A,T,C or G
agcgtggtcgcggccgaggacacaaaatacacttgcaagcttgcttacagagacctgttaaacaaagaacagacagattctataaaatcagttatatcaacatataaaggagtgtgattttcagtttgtttttttaagtaaatatgaccaaactgactaaataagaaggcaaaacaaaaaattatgcttccttgacaaggcctttggagtaaacaaaatgcttcaaggctcctggtgaatggggttgcaaggatgaattgcattttataggtaaaatggtatactgactcaaatcattatggctataacaagcttcatttatttataatcttcaatgaaaataagttgattctttggcataatactataaggaataaaaggacccataccacccactggctttatctagagtgggagatagtagtaggggaactgtttataatgtaatttgtctaagtttattcctcttagaaaagcgacctgcccgggcggccgctcgn

SEQ ID NO: 4416 - DNA, 311 bp, Homo sapiens
gccgcccgggcaggtacacacaacctgattttaatattctatctgctgcagaaatacttatcagctttcaaatcaaagtgaaaagaaaatgagttaatttaaatggcaaattcaaggacatttatacaaacattatattcttaattttggcaataatttttaatattttgccttaaagtcctgggaacaaagggctcttgctatccattcatttcattaggtgaactgaagatatgagtgggagaagttattctggatcacggacacacattagcatggaaataatgatgtacctcggccgcgaccacgct

SEQ ID NO: 4417 - DNA, 482 bp, Homo sapiens
ctaatacgactcactatagggctcgagcggccgcccgggcaggtacccataggggaacatcarcagcttgggaatagctgtggagggtaatgaaggccttgacttttccatgactcttgatgaagtscactatggatttcacttcaacttcagagttggcactgggtccgtggtatgaatcakagcaagggttgctgctggctccaggtcctccaaaacctgcatcccagttccggttaggatccacaccaacacagaggcttycagataccttggaccgggtcttccgccacatacgatttttggtttgagagaacacgtatccatcagggtttgtgactggcargaggaagatatccagggcatccagaatggaagtgatggatgggtcctttccataatcagaaacaatcttatttgctgtccaaagtgccgtarcttgtgtaacccactctcgagcatggatcccarcatccagccag

SEQ ID NO: 4418 - DNA, 556 bp, Homo sapiens
agcgtggttcgcggccgaggtacaatctaactcagaatgggattaaaaattttagaagcagaagctaatatataaatgaagtttgggatttggaactttctgtatctcttaggaggaacaagtaaaaaccaaatggttacattgtgctgctagaaataatgtcattctcaattaaaagggttacacctgtagccacttgacactaacaccatcgagggcaattaatcaggagaaaagtaaatataaaaactgctcttaacgtcacacactacagggtaattatgtaattctctagcactcaattaagaagcttgtaggttagcaaaatttcagtttctctagttcagccagtgtcttgtccttagtaattatttgctttccctgcagttcaatttctccttggaactctaacaggactaactggaaaaatactttgaccatagctctagtacctgcccgagcggccgcccgggcaggtacaatggtgaaccagtccagatccgggtcccaatgggcaaggagccacctcatcttatgtccatcttcaagggacgca

SEQ ID NO: 4419 - DNA, 515 bp, Homo sapiens
  misc_feature 509: n = A,T,C or G
tcgagcggccgcccgggcaggtacaggaaaaaatggacttgggatataagttaatggtgaatataggtgcacttgctgtattttgtggttaatgttttgaatgtatgcaaaatccacactcaataaagcacactgataaaatagatttccaataagactacaggctctgaaaaacaaactggctaagttggthkagaacataggtagaaattatcgctgattagaaatatttacaaaaaatagctttaaattcatacgctgaagaataaaagaaatgtcttccaagtatacctgatgtcaataagatcccaaataaatcaaatgtaaacaccatctggatggatctgtgttacctagtgacatgcagcgctgcttcatggatagtgaaaacttggcatcccacctctagcataaaactttttctgtaactwyaggtttggggagaatgaaagtgatttaamtatmtatgcctatctgatttthaaaaaataaggatttccagcctctantatcac

SEQ ID NO: 4420 - DNA, 498 bp, Homo sapiens
tcgagcggccgcccgggcaggtacaaggctgccaactccatccgcctagtgaggatacagtgatattcaggccaaattgaatttcttcccccggggaagattattttgcccctttgctctctgttttgttttataagtaaaaggtgtggttgtgaaatccatcttttgtgtcctgctgctgatcaatctcaacatgaccccagggagctcgggcacaggggcctttccctgaccagctcccctgttgtttcttaactggctgcctggccacctcttgctccagttgtaatgacttttgtcatgtaagcatgtctgaaaggagtcacagtcaactctcaaggtagcccttcaaacaagcgagtgattataagtattgatattcacttcccacactacgacaagaatcagcaaaaacagtagtttggtgtcagatacatttagtgactcactaagatgacattatcatttttttatacataaaaatacttgtatcttatt

SEQ ID NO: 4421 - DNA, 586 bp, Homo sapiens
  misc_feature 582: n = A,T,C or G
tcgagcggccgcccgggcaggtacagctcacaacctgtggtggtgtctttggacaagtaacttctatgcctcaatttcctcatcttagaatgggagtaatattagtaactacgtcgtgggcctattgtggggactgagttaacatctgtaaagtgcttagaacagtgtctaatatatagttaattctcaatacacgtaagtcgttttcattataattatgttcctctatgtagtagaaagggggtcttgtcttcaccatatcggtagtgaggactccctcagctctaagtcatttctggcaggtgagagggtgggacagctctagcagaatatgggtttaaaggggaaagcaactaataggagatgcagtggggtaactggaaaagaacagttttaaggaagaggtggagctcagaatctgagtgacccaaaggacagcttttgacttcaagaagtccctcttgtttgttggcttgcttccagcttatgttctttacatctgctggctcagcgcattgggcagctttcttcttttttctcagcgacaatcttttatcctatctgaccaggatttctctgctncccg

SEQ ID NO: 4422 - DNA, 408 bp, Homo sapiens
  misc_feature 187: n = A,T,C or G
tcgagcggccgcccgggcaggtacttttatatatactatctatgaagaattcactaaagcatgaatcaccttataatgagaagctaaaaatgtatcaaaacgaacataagtataggtaatccacatcaaacatactacatcttccaagtctagagcatacactggtataaactgtattacaacccanattagtttgaaatcttgtttcaaaacattgctcagtattaagtctcagtagacaaataataggaccacatgagaaactgttcggcaggtggctgaggaaaccttaacttccaaaggctcaaagtggtcctccagagactgttacactcccttaggtatttatttaagggaaggacactattaarggacacttttgagtataaagacaggtgaactcacaaa

SEQ ID NO: 4423 - DNA, 281 bp, Homo sapiens
tcgagcggccgcccgggcaggtaccagaccttggaggaggtgttcattgaagttcaggtgccgccaggcacgcgcgcccaggatatccagtgcggcctccagagccggcatgtggcgctgtcggtgggcggccgcgagatcctcaagggcaaactctttgattctacaatagctgatgagggaacatggactttggaggacagaaaaatggttcgtattgttcttacaaagacaaagagagatgcagcaaattgttggacttctctactagaatctgaata

SEQ ID NO: 4424 - DNA, 470 bp, Homo sapiens
tcgagcggccgcccgggcaggtaccacgtgcagatcaattaatgtgattcagtatatcaacaaatgaaggaaaaaaaatcacgcagtcatctcaaaagatacagagaaagcattttacaaaatgtaacaacctttattgataaaaatgcctaataatatatgtgtagaaagaatttacttcaacataatgaaggctgtatatgaaaagggcacagctgacatcacactcaatggtaaaaaactgaaagctttttctctaagatcagaaaaaaagacgaggatgcctactgttgacacttctattcagcatagcactagaagtcctagccagggcagttaggctagaaaaggaaatacgatgcatccaaatcagaaaacaaggagtaaaattctctcttttcacagatgacatgaccttatatgtagaagatcccagagacttcacaaaaattgttagaacttggagcagg

SEQ ID NO: 4425 - DNA, 486 bp, Homo sapiens
tcgagcggccgcccgggcaggtacctggagggatgcaagacttcaattaccttagcagcaactgttttgagatcaccgtggagcttagctgtgagaagttcccacctgaagagactctgaagacctactgggaggataacaaaaactccctcattagctaccttgagcagatacaccgaggagttaaaggatttgtccgagaccttcaaggtaacccaattgcgaatgccaccatctccgtggaaggaatagaccacgatgttacatccgcaaaggatggtgattactggagattgcttatacctggaaactataaacttacagcctcagctccaggctatctggcaataacaaagaaagtggcagttccttacagccctgctgctggggttgattttgaactggagtcattttctgaaaggaaagaagaggagaaggaagaattgatggaatggtggaaaatgatgtcagaaactttaaattttt

SEQ ID NO: 4426 - DNA, 415 bp, Homo sapiens
agcgtggtcgcggccgaggtacaagctttttttttttttttttttttcgggggaagggtagatcaccatctggaatggtctattttaatttttttcttttcttttttcttttctttttttttaaatcaaggaacattgtcttggctttttttttttttttttttttgrcattgcttttctcttttctttccttttttttttttaaagagaccattccactttattttaacatctggatgcataaggactcatgtaaagcagtcatacmccattatcattaaaacccatatggtaaaatacatacmcagtccaacaaaaggctaatacatagtaaagcctaagcatactactatgtaatattataatacataacttggaractttagttaaagtacatgcccgggcggccgytcra

SEQ ID NO: 4427 - DNA, 385 bp, Homo sapiens
cgagcggccgcccgggcaggtacatccttgaatgtgtgaggctctcattggtataagtttaattcctgactgtggatgaaagctttaaaactttgcgggcaaaatacagaatgaatttcagtgagttcccatgtattaaacaaggtggcgctggctggagacatgctgtccctgtgcccacaggagtagcagtgctgtgctcatcttccysacccgctcttcacagtcttcaccgcctttcttcaggagtctcccctttggcttttccacagctatgaaacccacgtagtcggacaccctaatgcttctcctgtagggtgtgtgatgaggaggtgagcttggctttggagkgctgggaacctgaggaatygccaaggacccagag

SEQ ID NO: 4428 - DNA, 323 bp, Homo sapiens
gggccgcccgggcaggtactcaataaatatatgttggaaggatggatggaggtaatggatggaaagatggatggaaggatgaatggagggatggatgtgacccagctgaagtgtgagtaggaacattctcttattatgggtggaggaaagagagaggagattgagaaaataagataaaatacattgatgcgcatcatttttggtgttcgaaaagtaggattgaattaggactaataaatctagagaattttacctctttcaatgcccaagccacacttttctatcactttgaaaccgaaaaagacctcggccgcgaccacgct

SEQ ID NO: 4429 - DNA, 471 bp, Homo sapiens
cgagcggccgcccgggcaggtacacataagaaaaggattcagtaacacttgggcaagtaataaactgtagaactttaaaagtagtaaaggcatataccaagcatacgtgactccacacattgtcagaaaggcagtggactggctaacgagtttctgccaagtttcagaagcaaagaatacactaatgaaaagggtaaggcatccaagcagagtgtctgaattgatggaccatttttgtctaaaactaatttcaacatcttccaatatgcaagcaggcatttgttttacataaggtgaaacactttataagagaaaagaaaactcctataaagcttataagatcagaaaaaattaatactgaatttttataatcaatgcatggagcaatgatataaactgaccataacaattttgtgagaacaagtataaaactatccattactaccttaaagagttgaaagttaagccctc

SEQ ID NO: 4430 - DNA, 462 bp, Homo sapiens
tcgagcggccgcccgggcaggtacgaaaacatgagcccccacgatgaggaaaaaggcgcatatcagagaaaagaaaaatgctgcgatgatccaatggcaggagcagcgcgcatccactttctttgtttttttgagatggggtttcgctctgtctcccaggctggagtgccgtggcttgatctcagctcaatgcagcctcaacctcccaggctcaagtgatcttcccatctcagcctcccaagtagctggaactacaggcgtgcaccactacacgtttactttttgtagaaacagggtctcacaatgttgccaaggctggcatcctgaagggcgggtggggcttcatcctacagagatgaaaggcagaagaagctcagagcccaaagcaaaggggtggaggacaagggcatcttcagaacagagtggctcggctgagacatccagtaggatgccaccaggcag

SEQ ID NO: 4431 - DNA, 456 bp, Homo sapiens
cgagcggccgcccgggcaggtacttctcaaggacgaaacgaaaaagaaacaagttagtaaaatttacaagctgtatttataactttggatatgaattaaacagtaacgtttcttttccacagtgagaaaagctagaatgtggagtcctgtcatcagatgatgtgactacatggaatgaggactatagctgctctcttaaaaacctgcagccccctctctcagcccagacagttgaggtatttatgcaccatcataacattaacagcatctttgctctggaaagtgggggtttatgatttctagggtaaatcctcgcctttgggagtgtgaatgagacaagtgtatcagcaactgccaggaccaatcaatagatgtgcatggaacattctcttcatccccaaatcagaatgaacacagtcctttaaagtctgcactgcaggtgaaattcacatgact

SEQ ID NO: 4432 - DNA, 679 bp, Homo sapiens
  misc_feature 554: n = A,T,C or G
agcgtggtcgcggccgaggtacaatgaaatttcttaagttttagaacacgagataaagttgtatactctactttcatgttaaaatgttaatcatgattactttaagcccacatccactgagtaaagagtcactttaaactttataaatcaaagagatattaggaacattcagaattatttgtgttttgtttttgttttacattgttgctgcactggcaataagtatgtggcactgtttttatttgtttatgttatttaaatacacacccaggcacacacacacacagtttttgctttttctggaaaatctttctttctcctctctctccatgaaaattaaaacacacaagtgaatgaagtaattacatagtccaagattagaaatacaagtaaaatatataggtataggtagatagagtgcctttctgtttcttttcttttcttttttctttttttgttcttccttcctttcttccctcctccccctcatccttccctttctccttcttttcccttttttttttttgacctgggagtaataaagttactttttnaatgcacgtatgcaatcttttattcctcttgttttatggataagagatttgttcaggtcaaaagttgcaaaactgttctgaagcttaatattagagacccaagtaagattgtttttagtctgctt

SEQ ID NO: 4433 - DNA, 486 bp, Homo sapiens
cgagcggccgcccgggcaggtactkggcaccattaatgaggatgcaggagatcaggtggcccaggccttcgaagatatactggaacttgtgctgctgaaggctggcgctcatggcctcttcaatggcgctgatatctttgttgagcttgaccaccagggggtcataatccatactttccacattagccacaatggcatagttcccctcctttgcaagagggataagatagtggaaacagtgaaccctcacttccagatgtaagacaagcaagcagcggtcagccatatcctggaacgatttggcaagttcactgagagtctgcatgatctgctctgacactggggggagatccgtgttcgtgtggctgtcttgagcaggagaaagcatctgggatgtagaaagattggagaaagctgactttgttcgacttgccaaccattccaggctttcatgcatgttggccaaggctttgaggtcactgacgt

SEQ ID NO: 4434 - DNA, 487 bp, Homo sapiens
agcgtggtcgcggccgaggtactatgacctgacaagcaatgcagtcctcacattcatctattttgtggtctgcatcattgggttgtgtggcaacacacttgtcatttatgtcatcctccgctatgccaagatgaagaccatcaccaacatttacatcctcaacctggccatcgcagatgagctcttcatgctgggtctgcctttcttggctatgcaggtggctctggtccactggccctttggcaaggccatttgccgggtggtcatgactgtggatggcatcaatcagttcaccagcatcttctgcctgacagtcatgagcatcgaccgatacctggctgtggtccaccccatcaagtcggccaagtggaggagaccccggacggccaagatgatcaccatggctgtgtggggagtctctctgctggtcatcttgcccatcatgatatatgctgggctccggagcaaccagtgggggagaagcagc

SEQ ID NO: 4435 - DNA, 543 bp, Homo sapiens
  misc_feature 539: n = A,T,C or G
agcgtggtcgcggccgaggtacaagtaaagtaaacttaggtttgttttctctcccatggctggataaaccaaatctgatacatccacatttaaggttgttttccaagttggtttccataaaaggcctttaacaataataggcttttaacaacaaaaaggtatccctcccatcacaatgagagcttgatgagggctcaaaagtgacttcaaaaactgtaaataattattttccttggatggctttaaaaacagctactgatagcaaatcagaaacactaaagaaaaaagacaataaggaaacagctgtttgtctagtgaatccataataaataccaatttgaggctatagattacaaagccaaaatattcttataggaaagttaatgtttatatttacaatcccatggactaaaaaaactgtctaatatcttaaagactgagtctacctttatttaacattgtttatacacaaagacccaagggatggtagaattcttgatccttctggacaaaagcatagtgagaggggactgaaattnacaa

SEQ ID NO: 4436 - DNA, 481 bp, Homo sapiens
agcgtggtcgcggccgaggtaccaacatcaagcttggtgtgattgaagaccactcgaatcgaacacgtcttgctaaacttcttaggttccagtcttctcatcatccaactgacattactagcctagaccagtatgtggaaagaatgaaggaaaaacaagacaaaatctactgcatggctgggtccagcagaaaagaggctgaatcttctccatttgttgagcgacttctgaaaaagggctatgaagttatttacctcacagaacctgtggatgaatactgtattcaggcccttcccgaatttgatgggaagaggttccagaatgttgccaaggaaggagtgaagttcgatgaaagtgagaaaactaaggagagtcgtgaagcagttgagaaagaatttgagcctctgctgaattggatgaaagataaagcccttaaggacaagattgaaaaggctgtggtgtctcarcgcctgacagaatc

SEQ ID NO: 4437 - DNA, 493 bp, Homo sapiens
agcgtggtcgcggccgaggtaccaaattttaaagcagcagtaacttaatttttatatcagtgtttttgttttgcacaaactaaatgcagtggtaggtgggtttatgagtatattaattgcctttatccatttgtgaagttaagttgatgagggcaaggtttttgtttgtttaatttgtatatgtctaaaggtatttggaactttttacaggaattaaacatatatgcaaatttgtatataaaaatagcatggccatcatttgaatgcttgtaaatgaaaggattatcttttttgagatctatatataaatagaaatagaaaatccagctggactgattaggattcttttttaattcatttgtgtataacatttttattacaattacacatcagttttgacacagtcatagcaacattaatattttcccatgatgcagatcctttttgtaatgggcttgttctttgagatctctgtaaagaaccctgtgaacta

SEQ ID NO: 4438 - DNA, 362 bp, Homo sapiens
agcgtggtcgcggccgaggtaccaagcaatgaagaacaaattaaaaatctgctacaattggaggctcaagaacatctccagcttgatttttggaaatcacccaccaccccaggggagacagcccacgtccgagttcccttcgtcaacgtccaggcagtcaaagtgttcttggagtcccagggaattgcctattccatcatgattgaagacgtgcaggtcctgttggacaaagagaatgaagaaatgctttttaataggagaagagaacggagtggtaacttcaattttggggcctaccataccctggaagagatttcccaagaaatggataacctcgtggctgagcaccctggtctagtgag

SEQ ID NO: 4439 - DNA, 462 bp, Homo sapiens
agcgtggtcgcggccgaggtaccatatagatcaaaagctttgtaaccacaggaaaaaataaactcttccatcccttaaagaatagaatagtttgtccctctcatgggaattgggctgtatgtatattgttcttcctccttagaatttagagatacaagagttctacttagaacttttcatggacacamtttccacaacctttcagatgctgatgtagagctattgggaaagaacttccaaactcaggaagtttgcagagagcagacagctagagataactcgggacccagagttggtcgacagatgttagatgtatcctagcttttagctataaaccactcaaagattcagcccccagatcccacagtcagaactgaatctgcgttgttgggaagccagcagtggccttgggaaggaagccatggctgtggttcagagagggtgggctggcaagccacttcc

SEQ ID NO: 4440 - DNA, 318 bp, Homo sapiens
cgagcggccgcccgggtaggtgcgtgctggctccttgtgctgtctgtcttgtagcgccctcccagccagtgctgttccctgaccgctttgctaaatcattttcagaccattgtggccgccatgagcaacctggtgccccccgtggagctggccaaccccgagaaccagttcagagtggactacattctgagtgtgatgaacgtgcctgactttgacttccctcccgaattctatgagcatgccaaggctctgtgggaggatgaaggagtgcgtgcctgctacgaacgctccaacgagtacctcggccgcgaccacgct

SEQ ID NO: 4441 - DNA, 486 bp, Homo sapiens
agcgtggtcgcggccgaggtactacctacgatggaaccacacccctgcatatagcagctgggagagggtccaccaggctggcagctcttctcaaagcagcaggagcagatcccctggtggagaactttgagcctctctatgacctggatgactcttgggaaaatgcaggagaggatgaaggagttgtgcctggaaccacgcctctagatatggccaccagctggcaggtatttgacatattaaatgggaaaccatatgagccagagtttacatctgatgatttactagcacaaggagacatgaaacagctggctgaagatgtgaagctgcagctgtataagttactagaaattcctgatccagacaaaaactgggctactctggcgcagaaattaggtctggggatacttaataatgccttccggctgagtcctgctccttccaaaacacttatggacaactatgaggtctctgggggtacctgcc

SEQ ID NO: 4442 - DNA, 482 bp, Homo sapiens
agcgtggtcgcggccgaggtactactaaattaataaatttattccacttttgaaatgacagccaaaaatccacctaattgattctcatttggcacgttcttctcaattctgttcactaaattaaaattactaaatttaaactgccaagagccatgatgttgtctgcacaagacaacattttccatcactttcagaaagttatatttggcatgttaaggaaaaaaaatataatcccacagcagcagctatttaaaataagacagccacaggattcatgcagaatattttaaatattcctgttgaacacaatgatttaattgattttttcttcacggatgatgctcccaaacatcctatatgcatccatggaaatttaaagatcctggaatagcgtcttccatgtgggacatcttaaaagatagtattttggcttcagtgagttacacaaatgaatcaccagtccttattaattcaatgggtct

SEQ ID NO: 4443 - DNA, 503 bp, Homo sapiens
agcgtggtcgcggccgaggtactgcctcaggccccaggcacagggggccttcctggcgtgtttcactcatacagagggcatcgggtcccaccctgtcactcatttcatcgtctaaaatgtaatcatgagtgtttgcttcgagccagggacagtgctgctgcaggggacccagctgggaccaaggcagactgtctctcccctcctgggatttacagggtcatggctctgaaacattctgtagtgttctttggacacgagttttccctggagatcgctttctgcaggcctcttggtcctgactgtggcttcttttcagagcctgccattcgctgcaaggttgaacacccccatgggccctggacgaactgtcgtcgttaaaggagaagtgaatgcaaatgccaaaagctttaatgttgacctactagcaggaaaatcaaaggatattgctctacacttgaacccacgcctgaatattaaagcatttgtaagaaattcttttcttc

SEQ ID NO: 4444 - DNA, 388 bp, Homo sapiens
agcgtggtcgcggccgaggtaccactatgtaggaggtttctatggaggctgcaatgaagccctgatgaagcttgagttggtccatcatgggcccatggcagttgcttttgaagtatatgatgacttcctccactacaaaaaggggatctaccaccacactggtctaagagaccctttcaacccctttgagctgactaatcatgctgttctgcttgygggctatggcactgactcagcctctgmtatggattactggattgttaaaaacagctggggcaccggctggggtgagaatggctacttccggatccgcagaggaactgatgagtgtgcaattgagagcatagcagtggcagccacaccaattcctaaattgtagggtatgcct

SEQ ID NO: 4445 - DNA, 475 bp, Homo sapiens
  misc_feature 466: n = A,T,C or G
agcgtggtcgcggccgaggtactttgtgctccacgacggcctccgccgctacttctcagagccactgcaggatttctggcatcagaaaaacaccgactacaacaacagccctttccacatctcccagtgcttcgtgctaaagcttagtgacctgcagtcagtcaatgtggggcttttcgaccagcatttccggctgacgggttccaccccgatgcaggtggtcacgtgcttgacgcgggacagctacctgacgcactgcttcctccagcacctcatggtcgtgctgtcctctctggaacgcacgccctcgccggagcctgttgacaaggacttctactccgagtttgggaacaagaccacagggaagatggagaactacgagctgatccactctagtcgcgtcaagtttacctaccccagtgaggaggagattggggacctgacgttcactgtggcccaaaagatngctgagcca

SEQ ID NO: 4446 - DNA, 517 bp, Homo sapiens
agcgtggtcgcggccgaggtactgagccctgaagcagttcgaaatacattgagtttgatgcattcctgtggcatgtatgacttctcagggcagtttgctttccatgttggtcttcctgcaaaatctggagttgctgggggcattcttttagttgtccccaatgttatgggtatgatgtgctggtctcctcctctggataagatgggcaacagtgttaagggaattcacttttgtcacgatcttgtttctctgtgtaatttccataactatgataatttgagacactttgcaaaaaaacttgatcctcgaagagaaggtggtgatcaaaggcattcctttggaccattggactatgaaagtctccaacaagaacttgctttaaaagagacagtatggaaaaaagtgtcacctgagtcaaatgaggacatctctacaactgtagtatatagaatggaaagtctgggagagaaaagctaaagaaatgggttctagtttcagaatgtttcttcatttaatc

SEQ ID NO: 4447 - DNA, 422 bp, Homo sapiens
agcgtggtcgcggccgaggtactgacagtttactgatagtgaggagtttacaaaggtgaacagtctagtatgattaaagatgcgacagaagtttttaaaattattgccaaataagctgcttttctaccattaaaaaaawttcctcaactcagattttaaagttttaaatgccaagttaaaataattatgaatctactgttccctagttccatccactacctatttcggatctgggttttgcccttaaacgcctattctatcagaatgaactgggtcaccacgccctatttctttatgttcctcttgacatttactccatgttttctttttctaaataagctttctctttctgttttcaaaattgaatactttctcatcttagccaagcacctattttcactctttcttctgctagctaataa

SEQ ID NO: 4448 - DNA, 189 bp, Homo sapiens
ttgagcggccgcccgggcaggtacaagctttttttttttttttttttttttttttttctttttttttttttkggcagctcactccaggtttatttcagggcagtttgggggtgggggacaaaracccccctccagctcctaaactgggtcacttttctcccaggkgaaggggaccatcctmatgggatc

SEQ ID NO: 4449 - DNA, 556 bp, Homo sapiens
  misc_feature 510: n = A,T,C or G
agcgtggtcgcggccgaggtacctgttcacaaaaggggaaaatatgcagaagacttgaattacacgaaagtataaatgtcagtagctgtgtaagagcaatcatagagggagaaggagtcctaaaaagaaataggcattacataatcaggatggagaccctcaaagagggataaagaaacccatgaaggagaaaaatggtgaagaataaagacaatgagaggagcaaaggcatgaaatccatgaagctgcttcaagacttaaggagaacaaggaattttaactcaccaggaaatgacctgtcttacgccataaggtttgaactacctcagtgcggtcagccttgctgggcagttcacttaaggaaaaagctgacactactacatcaaactgcaccttgggtgatacaggtagaaactgtctgaaaaagacacctggaatataaggctccccagattctgaaccacctttcagtagtttttctgccaaaaccaacatggcagctgatctgtncacacacatatattcacgtaggctctggccccaaatactgtgagca

SEQ ID NO: 4450 - DNA, 362 bp, Homo sapiens
agcgtggtcgcggccgaggtaaatggtgcccaggttgactgctgtactgcagactgcaatggcagctggaagtttaggtctcctcctacctggatctcattacttgggccgttttcaggatcgtttaatgtggataatgattctggaatgtggctatacttattgctctattaacattaaggggttagaattgcaggaaacatcctgtcatactgcagaagctcgcagagttgatgaagtttttgaagatgcttttgagcaagaatacacaagagtatgttcccttaatgaacactttggaaatgtcttgacaccctgtacctgccgggcggccgctcgagccctatagtgagtcgtattag

SEQ ID NO: 4451 - DNA, 481 bp, Homo sapiens
gagcggccgcccgggcaggtacatgggcacttgtcatatctctgtagatttttgtgtatttaaactatttcacaattttttaaagtattaattttaaaaagcttgtgtttggagatgtgagtattcttccctccttttttcaacaaactagggcttagaaaagtgcttgtatcttaatgcagtatgcaggtttccagggaaaatgtgtaaatgtctttatacccttcgatgctgctgcccaccagtgatgtaaatcacaaagcataactcttgttttgttctgttgagcagcatgagatactttgatagagcagccttatttgtggaagcttgcctcaagtatggagcatttgaagtcactgagggcacagagaaactcatcactgctatatatgcagattatgcccggagtttgaagaacctcggttttaagcagggagcagttctctttgcttcaaaagccggagcagctggcaaagac

SEQ ID NO: 4452 - DNA, 474 bp, Homo sapiens
cagccggtggtcgcggccgaggtctttttttttttttttttttttttttttttcttttttttttttaaagccaaraacttattttattttattttaaaataaacattgaaaatcccccatttcccaccaccctacaaaacttttgaatgkggaatgttcaacagcctwtccattttggtaggttacaaaaccagcaaaaactccagttgtctaatgatraatgtttgaraatagttttgtttttaaatagctgascmcctactggaaraattcctgggctaaatgctgaaaataaaatttaatttctgcmcaraaaataccattaacttagtascctttgcttaaaggkgggattaattctccatgaagtcaraatgagacaataagcagcattaacttcataggcmcacaraactagkgctcaaactgctagcacaaatttcaacaragtacctgcccgggcggccgytcgaa

SEQ ID NO: 4453 - DNA, 477 bp, Homo sapiens
tgagcggccgcccgggcaggtacttttcttgtattttttcccctcttctttacagtgatatggtaaagaagaggggaaacccagccagctactttttttcatcactttttattcataacttcagatttgtaaaactaatttccaaaatataagctgttttcattagccagttctataatatcttcctgtgatttatgtagaaaatgaacacaccccttttccatttaagaccctgctactgtgtgaagagatgatacttacaaggagtgtcattacctgtgagctgactgaatgttggtaggtgctccattacaatccaggaaagtctgtgttactgatatttgtgtggaaatctttatttcacttcaatttaaccattagatggtaaaattaagatgctacttgttggtaaaaattggtggactggtttcaatgggtaaatgtgttgtggcaaattaatgtgttggaatattgctc

SEQ ID NO: 4454 - DNA, 236 bp, Homo sapiens
cgagcgggccgcccgggcaggtacatgcagctcatcccgcagcagctgctgaccaccctagtgccgctgttccggaactcgcgcctggtccagttccacttcaccaaggacctggagacactgaagagcctgtgccggatcatggacaatggcttcgccggctgcgtgcacttttcctacaaagcatcgtgtgagatccgcgtgcttatgctcctgtacctcggccgcgaccagct

SEQ ID NO: 4455 - DNA, 354 bp, Homo sapiens
ygagcggccgcccgggcaggtactataagagaaaaactgaagcaggaaaacagtgagcagcgcctctttcttcttgcactcaaatgattacttcactcctgtcagctttatagtccaagcaaactctgcggggacagcakagggtggcaactggggtagagagatgaagagacctttatctggatctgtggaccacttcagatctccttgaatycccagcattgttatctttgtagttgaggtagttatgggggattcaaggtttaagactccattttctggccagtgcagaaaaatggcataaacagccgatccctttgaggtataccatacagatgttgkgttcttttccca

SEQ ID NO: 4456 - DNA, 353 bp, Homo sapiens
tgttccgcttcaacaacattaacttggatccacttacagaaacttatgggattcctttctacctacaatacctcgcccactggccagagtatttcattgttgcagaggcacctggtggagaattaatgggttatattatgggtaaagcagaaggctcagtagctagggaagaatggcacgggcacgtcacagctctgtctgttgccccagaatttcgacgccttggtttggctgctaaacttatggagttactagaggagatttcagaaagaaagggtggattttttgtggatctctttgtaagagtatctaaccaagttgcagttaacatgtacctcggccgcgaccacgct

SEQ ID NO: 4457 - DNA, 646 bp, Homo sapiens
tgagcggccgcccgggcaggtacgccgttccggaatcacgtgagaagaatgacctgggcattcagagctacagcagatggcaagtttataaaggagcagagtgacgtgtcctgcacagaaacacatgactgttgagaccgttatttaagtctaacgggcatttgcgttgcacagtgagttggagataactcgggggatttacaagtccagttgcttgaaagagtcaaattgattgtggccttttctttcgctgctcataaactattaccacccagttagctttatttatttgtggtgttaagaatcttgatgtgaccgaagaagtctgtggcatggtgccaaggcaggcccaacactgggaaaggactaattttttttgtatattgagagaaaagtttcacatagactggccagagttccgaagcacaactacagacagcgtcatgacagggcgacttggcaggacaccttgatccaaggcgacagcatttggcaaggacacggaagttgggtcgttgcatccatcatcaggagttgacttgttctgagcaactgaacagaacacaccgcgatgctctcgacacttccgctcctggacttcagtcacgagtgagttgatggtgacttgacctgagagatttcacag

SEQ ID NO: 4458 - DNA, 491 bp, Homo sapiens
ggccgcccgggcaggacgagctgagattgccagcaaagagaaagaggaagaggaactgatggaaaagcctcagaaagaaaccaagaaagatgaggatcctgaaaataaaattgaatttaaaacacgtctgggccgcaatgtttaccgaatgctttttaagagcaaagcatatgagcggaatgagttgttcctgccgggccgcatggcctatgtggtagacctggatgatgagtatgctgacacagatatccccaccactcttatccgcagcaaggctgattgccccaccatggaggcccagaccacactgaccacaaatgacattgtcattagcaagctgacccagatcctttcatacctgaggcagggaacccgtaacaagaagcttaagaagaaggataaagggaagctggaagagaagaaacctcctgaggctgacatgaatatttttgaagacattggggattacgtacctcggccgcgaccacgct

SEQ ID NO: 4459 - DNA, 570 bp, Homo sapiens
agcggccgcccgggcaggtacattaagactaaagttatggattgttcctgtttggcatagaaatgtgatgactattaacagaaaggggaaaaagatttgccccctatccatcatcagacagacagacttctcttactaaaccccttatgtggagtgggatgagtgactatttcctgcagaaagatcatgcaacttaaagcaaaaaaacaaaccaaccaacaaaaaaaacaaaaacaaaaacaaacttgtgcatattacacatgactgattattgggtgtgcctggcaagactaaatgctgattcttttcagcgtttgaattaaaagaattccatatacagcagatagataacagtaacaaatattgaactaaaatcgctggcaacattatatatttaaggttccatcataaactcctcattattctctatgtattctgttacagcttctagcatgcttcatcgtgacaacctattatcaagcctcatattttcacaggattatatacttattagatgtttgtttctagaaattatactacatatgtgttactaggcatatttaaaataag

SEQ ID NO: 4460 - DNA, 518 bp, Homo sapiens
  misc_feature 508: n = A,T,C or G
agcgtggtcgcggccgaggtaaaactatgatgtttagttgctttattttacctctatgtgattatttttcttaattgttattttttataatcattatttttctgaaccattcttctggcctcagaagtaggactgaattctactattgctaggtgtgagaaagtggtggtgagaaccttagagcagtggagatttgctacctggtctgtgttttgagaagtgccccttagaaagttaaaagaatgtagaaaagatactcagtcttaatcctatgcaaaaaaaaaaaatcaagtaattgttttcctatgaggaaaataaccatgagctgtatcatgctacttagcttttatgtaaatatttcttatgtctcctctattaagagtatttaaaatcatatttaaatatgaatctattcatgctaacattatttttcaaaacatacatggaaatttagcccarattgtctacatataaggtttttatttgaattgtaaaatatttaaaagtntgaataaaat

SEQ ID NO: 4461 - DNA, 338 bp, Homo sapiens
agcgtggtcgcggccgaggtattaggtgaggtcaattgatactgcttaaaaggcctggtccgtagaagatgcccaataaacattactgctttccccctcaccctactgcctgaaaaaatattacacctgtgagactgactttgagaaccagtgtgggtggggagttgtgcatataaactatttaatgagtaccaaacacaaaagtcaagcttgtaaaatatcaggccttgccccagaaagacaaataccacatgatctcactgatatgtagaatcttaaaaagtcaaactcagaagcagagagtagaatgatggttatcaagggctgggggagggagg

SEQ ID NO: 4462 - DNA, 347 bp, Homo sapiens
agcgtggtcgcggccgaggtagaggtgccattagcagaatttgccaagatccgagaaaaattttagctttagttctatttcagcagtcacctgacgtccttgtctatggtcttaaaaacaagaaggcacacatttgataagatgagattaaggttaggagaaaacctcagtcattgcatgctttttagtatgggccaataaaatctcaacacctgtgggagagtaagaactaasggaatgagtttgggcggcccctcataaaggaccttagaggcagggaacagcaatgccaaatttccctctctcgtgagatgggggatcctgtgcaggctgatgaggcacccatg

SEQ ID NO: 4463 - DNA, 313 bp, Homo sapiens
agcggccgcccgggcaggtacttggcccgggtcacgcgtgggtcctctccgggctcgggagtagcatcctcaggagtagtgtagcgagcaaattctggaaagtagtcctcaatcttcgatttcccagcaaggactttctcagcgagcagatcttgcttgttgaggaacaggatcacagagatggtgcgcagccatctgttgttccagatgctcttgaagaggttcagagcctcctgcaggctgactatgtgccgagcgatcaggacctgcttcgctgccgtgtcctgacttctggaatctttgagaccaagtt

SEQ ID NO: 4464 - DNA, 509 bp, Homo sapiens
tcgaagcggccgcccgggcaggtactgtgatgaatagaagtggcaggaagagatgttgctatcttattcctgatcctagaggaaaagattttagtttttcaccattcagtatgatgttagctgtgagcttttcatgtataatctttatttactgaggagtttccatatattactaattctttgagtgtttttattacaaaaggtgttcatctggctctggaaccagataaatgttgacctgatagagtggattggaatgtccccttctggtttttgaacatttttggaatattttacaaagggctggcattaattcttcttgaaatgtttggtaaaattttccagtgaagttatctggacctggaattttcttttttggggggtttttgattactggttgaatcttcttactagttacaggtctctttggattttttatttctccatgatgcagtatggtggtttgtgtttctaggaatttataaatttattctaggttgcccagttct

SEQ ID NO: 4465 - DNA, 486 bp, Homo sapiens
tcgagcggccgcccgggcaggtccagcagctaggactgggagagataggagaagtaggactgctgtgattaggacggatcagacgaagaggggcgtttggtattgggttatggcagggggttttatattgataattgttgtgatgaaattgatggcccctaagatagaggagacacctgctaggtgtaaggagaagatggttaggtctacggaggctccagggtgggagtagttccctgctaagggagggtagactgttcaacctgttcctgctccggcctccactatagcagatgcgagcaggagtaggagagagggaggtaagagtcagaagcttatgttgtttatgcggggaaacgccatatcgggggcaccgattattaggggaactagccagttgccaaagcctccgattatgatgggtattactatgaagaagattattacaaatgcatgggctgtgacgataacgttgtagatgtggtc

SEQ ID NO: 4466 - DNA, 575 bp, Homo sapiens
tcgagcggccgcccgggcaggtcagcgacttgtcgcacgcttttctatatacttcgttccccgccaaccgcaaccattgacgccatgtcgggttattcgagtgaccgagaccgcggccgggaccgagggtttggtgcacctcgatttggaggaagtagggcagggcccttatctggaaagaagtttggaaaccctggggagaaattagttaaaaagaagtggaatcttgatgagctgcctaaatttgagaagaatttttatcaagagcaccctgatttggctaggcgcacagcacaagaggtggaaacatacagaagaagcaaggaaattacagttagaggtcacaactgcccgaagccagttctaaatttttatgaagccaatttccctgcaaatgtcatggatgttattgcaagacagaatttcactgaacccactgctattcaagctcagggatggccagttgctctaagtggattggatatggttggagtggcacagactggatctgggaaaacattgtcttatttgcttcctgccattgtccacatcaatcatcagccattcctagagag

SEQ ID NO: 4467 - DNA, 632 bp, Homo sapiens
  misc_feature 552, 569: n = A,T,C or G
cgtggtcgcggccgaggtaccaatagctctttcatagacttgtgctacaagaaggttaaaagaccagttttattttcagcattcctcatgcatttcagtggtaaccaaaaaataatttgtcaattaatagttgtgtgccaagcactcctaatttgttttattgcgtgtgtgtgcatgtgtgtatgtgtatcacaggtaataaaggcaattggatgatatctgtaggaggaaaacaatgactaatttcttccttttgaaatctttcattgatgcacatttattatgtaagatgttctgtcttgatttctgttcttagtgatgattagtatatgaatatctttctgaatttttgtaattctcgccttcacactaggatgacagactcagctaatgtttccttgtcctgaaggtttgaatggagttgaaagttttacataagtgaaaaagaaagtttatcttgggagttgagttgtcaagagaattataatttatgaatttaagtggtattcttttctgtattaatatattagcagatatttgatcttaactacnacatagctttgtttgtnaacttaccagtatgtcttgattckkttcaatgtttcttgatagcacatggcaataccatcatc

SEQ ID NO: 4468 - DNA, 509 bp, Homo sapiens
agcgtggtcgcggccgaggtctttttttttttttttttttttttttttattagcatatatttattttataacttcacatttataacattttactttgtataccgccaataaatgacaatgaaactattttcataaatacaaaaacacatgaaattagggtgtcatggtaaccactgcatcactttggkggaacagtattaaaaatagaatttaraaagataaatgatcacaagtgataccttttaaaaaatgcttttcttacaatctcaggatattcttcagttaaactgaaccacaatcagaaaaaataagtaattatttaaaagtcaaacctctaacaattgtcaacaactgctggaagagycatcacaaatataaaaaacaacaagcactcaaatttacaataagagatgaaacggtttctaacaccagggdaractggaagtcaactggaagcatattagcttgttaccacacaactgtsagaacaataaagaaagcatgcattg

SEQ ID NO: 4469 - DNA, 688 bp, Homo sapiens
  misc_feature 590, 615, 631, 641: n = A,T,C or G
agcgtggtcgcggccgaggtcagttctggctcagggtcactcatgaggttgctgttgtctgaaatcttagctaaggattggaggatgcacttctaagtgaggcctggctgtaggcaggaggcctcagtccttccccaggtgggccaacccacagggctgcttgagtgtcttcacaatatggcgctcggcttccccccagagcaagagattcaagggcccagggtaaaagccaacgtgttatttttatccctagcctcagaattcacacgccgttgcctccaccatgctctggtttgatacagcccagctctgattggaaggggctggggctgcccgtgctgactcttcaaaggcatcccatcctgcagatggtgttcacagggagagtttgtgggggccggcactccctcatctactggggctcattctggaagaaggtccagaagaattggagacccctgcccctcacccaaactttggaggtggcagggtgaacagcaggccaagttcaggtcccaagacaggccaaggccagtgcggtttcccttccactgcctcagtttacctgtattcagaagacagtctagaangagttgagcagagttccctctaaangagtagggagctgatnacagtcccangccctcctctttctctatgccaaaatcatttccgttatcctgagatg

SEQ ID NO: 4470 - DNA, 203 bp, Homo sapiens
agcgtggtcgcggccgaggtgaatctgctgcagcagacgctggctttgctctctttgagaagaagggagccttagctgaaaggcagcagctcatcccagaattggtgcgaaatggagatgaggagaatcccctcaaaaggggtctggttgctgcttacagtggtgacagtgacaatgaggaggagctggtggagagacttgag

SEQ ID NO: 4471 - DNA, 604 bp, Homo sapiens
agcgtggtcgcggccgaggtttttttttttaccagaaataaaattttattagtaacatgtcaaatgttttaaaatacaattacctttcttcttcctctcagtttaaaaaacaatccaataaaaactctaaatcatgatccaaatatttttaaatgtgaaaaagacatatttcagattatgtaacagatacacattttcccaaataaatgttgtagaacaccatctgcttgatatttgagtgcattcccacagaaataaatttctgcttctcttccttcattaatggcttatgacaaatttatgacactatatttcacaatagctataccaaaattttatgaccaaaagaggctgacaaaaatcacttggcatgctcaaattagacaatttatgtgactgtctcatttacaccaatcctccaccccttactgagaccccagcgactgaggagaaacagaaaaaatcactgtaggggaagatctctcacagaataaagctcaaaaaagagttcaagacaagaagttacagatccaggtgccattttcagctcaggttttccataatcttcagcttatgcagctacccaaaattctgaatttaatgt

SEQ ID NO: 4472 - DNA, 483 bp, Homo sapiens
gtggtcgcggccgaggtacttaaactccagaaagaaaaagctaggaaacagaagtagagaggaatggaaaaaaacaaaaaaacccaatacctctgccatcttgccccatcataacccaaatagcatcaaagtggcagagatgggactaaagttaaagcaagcatcaaagttattacttttagggtaatgggatgaatttgaagagcactatgtcaaccaaatactaaacttcatggaataactgtgtttgtgtttctgtggaggagttgcggttttgtttgttttaatttggcccacgctgccccaatggaggaaattttaagataatcattaataaggcaacagcttccaggattaaaatacctataccatctatacggagttacaatgaggacaagacccacatagaccacaaaggaaaccgggaccagaagcttccagtgcattttcacagatcgttggtacctgccgggcggccgctcg

SEQ ID NO: 4473 - DNA, 489 bp, Homo sapiens
agcggccgcccgggcaggtcggctgtgcagacattcaattgttattattatgtcctacaagcattaattaattaacacactttagtaagtatgttcgcctgtaatattgaacgtaggtgcgataaataataggatgaggcaggaatcaaagacagatactgcggcatagggtgctccggctccagcgtctcgcaatgctatcgcgtgcataccccccagacgaaaataccaaatgcatggagagctcccgtgagtggttaatagggtgatagacctgtgatccatcgtgatgtcttatttaaggggaacgtgtgggctatttaggctttatggccctgaagtaggaaccagatgtcggatacagttcactttagctacccccaagtgttatgggcccggagcgaggagagtagcactcttgtgcgggatattgatttcacggaggatggtggtcaagggacccctatctgaggggggtcatbcatgggg

SEQ ID NO: 4474 - DNA, 450 bp, Homo sapiens
akcgtggtcgcggccgaggtgaaaaccggtgaatctgggcttatgggatacagctggacaagaagattatgacagattacgccccctatcctatccgcaaacagatgtgttcttaatttgcttttcccttgtgagtcctgcatcatttgaaaatgtccgtgcaaagtggtatcctgaggtgcggcaccactgtcccaacactcccatcatcctagtgggaactaaacttgatcttagggatgataaagacacgatcgagaaactgaaggagaagaagctgactcccatcacctatccgcagggtctagccatggctaaggagattggtgctgtaaaatacctggagtgctcggcgctcacacagcgaggcctcaagacagtgtttgacgaagcgatccgagcagkcctctgcccgcctsccgtgaagaagaggaagagaaaatgcctgct

SEQ ID NO: 4475 - DNA, 501 bp, Homo sapiens
cgagcgggccgcccgggcaggtactaccagatcctacacttaaagctcagcattattggtataaaaacttaagacggcattagaattcttaagaaaaggtgtaaaatttaaaaagatgtgcaaacaacaaagaatgcccgaccctgaaccagacctaaagcaccttccagttcctccacacatcatgccccaacaccatccagcccaatcggacaccaggacagtgagggacgggtggctgttcagtgggcaacagatctggaaggaaagattttcaaaaaaaaaaaagtgtctgccaaatttgaaaaattaaaagttatctgtctagcagaaaaatcaaatgggtaaattagcactttagaccgataacagataataaaatgacaaatcagaatgaacaaaaaatcattaaccttttgatttcagtattttcaagagattttatcagaatactctaaatgacaaaatgactcatggtttcttatgtttgctaaaaagcaa

SEQ ID NO: 4476 - DNA, 424 bp, Homo sapiens
agcggccgcccgggcaggacagccttttgtttttcttaccctttttaaaaataaatccattgtcagaggaaggcaacactttttactatttaatcattcacttactggttcattcaacacaacagctatttactggatgctgctggggtcagggctgggaacacaaacacgaagagaccacagtgctcacccctcaggaacgaacaatctagggcagccaacacagaaatcaacaatcgtcacggtgccagatgaatgctgcagggaggaatgttcggagtgaaataggcacccttaggtttgctctatggaatcacggaagccttcccagaggaggaagcattgggtcaaggtgggaggtgagccasagtgtgtcaggctaatgaatgtggtgggctggggaggccattccagatggacggga

SEQ ID NO: 4477 - DNA, 152 bp, Homo sapiens
tcgagcggccgcccggcaggtgcatttacaaagatgcgtkcaaatagtgctctaagagttttgttcagtggctcacttcggctaaaatgcagaaatgcatgctggcagcgttggtattkcgcattcaatggagctgaatgttcaggacctct

SEQ ID NO: 4478 - DNA, 495 bp, Homo sapiens
gagcggccgcccggcaggtacacttgatggggtccttgaggtcctcaccagccacagtgacccaggacacagctatgacctcaggcatctgccaatttcacccccaaaaagaaaaaattaaaaaaaaacaaccataaataaatagtgtttctggaaatgaaaaaaaatttatttttgtgtttaaacatcattcccctactcttgaaaacatggaccatccctgtatttccccctcccccaaaaccttcccactttgagacaaattaatgacaaaaggatggttctgctgtggtttgctttttcaatcctgggtctagtgttttctgaactggtgtgagacaggctaaagatcaacgccacacacacaccccgtccttcatgagatgagggtttgttcagttcaatctcacatttaaatttcacttgtcatcggaacaaatttggagatctttaacgagataattktaaaacagaatcaaaagggatagcgcacct

SEQ ID NO: 4479 - DNA, 478 bp, Homo sapiens
tcgagcggccgcgggcaggtattataatgtcgaactctgaaacaaaagtatttaacgacccagtcaatgaaaactgaatcaagaaatgaatgctccatgaaatgcacgaagtctgttttaatgacaaggtgatatggtagcaacactgtgaagacaatcatgggattttactagaattaaacaacaaacaaaacgcaaaacccagtatatgctattcaatgatcttaaaaaaaaaaaaaagacgtttttaaaacgtagaggatttatattcaaggatctcaaagaaagcattttcatttcactgcacatctagagaaaaacaaaaatagaaaattttctagtccatcctaatctgaatggtgctgtttctatattggtcattgccttgccaaacaggagctccagcaaagcgcaggaagagagactggcctccttggctgaaagagtcctttcaggaaggtggagctgcattggtttg

SEQ ID NO: 4480 - DNA, 290 bp, Homo sapiens
ttccaaactyctgwtcaccatgaaaaggcaatcttaaagytcattatgttacactaattatwaacaggacccaatttatattcatagatsctctcaagtattatacaatttaaaaactyttgttccaaagtcctgtcttaactattgaaacaccttaatytgtggttactaatccaacaaattcaaggaaccaggctatgactaagaatttargtggaatygatgtctgggcaattaaaataaatggcataagagcttaaaaaccaaagttgtgccagtggctttcaact

SEQ ID NO: 4481 - DNA, 254 bp, Homo sapiens; identical to SEQ ID NO: 732

SEQ ID NO: 4482 - DNA, 115 bp, Homo sapiens
agaagcaggcaccgccactghgactctggggctgctgggaatagcctctatgctagchhtgggtgtgtgtgcacgtgtgggarktcacagggtatctttttggcctggywttctg

SEQ ID NO: 4483 - DNA, 62 bp, Homo sapiens
gaaacaaaktttgtttcaaagaggtctgaaattttaaaatcakaccaaccagwgggtagatg

SEQ ID NO: 4484 - DNA, 157 bp, Homo sapiens
  misc_feature 2, 105, 139, 141: n = A,T,C or G
gnatctgtaatagtttattttaaagactttacatttacaagtagaaacaacatgtgttatctgtgggtaaggtagagcaggaactctaatccaagggtggggganatcagttggttccttcacagaaaataagcctgtngngtgggcatcttgcttg

SEQ ID NO: 4485 - DNA, 323 bp, Homo sapiens
  misc_feature 87, 177: n = A,T,C or G
ttacacttacattttttattctctttttctaattaaatgcacatactaagaagtaattaaatcttcaaataattgttgttacatatnttaaatctgctaaacattgagaaaaatatagtatatataattacataaaaattttatttaatttaaaatcacgtttaaattatatcttanctatttacatacatgtttagtaactagtttacaattgtagctgatacttaacaaggataaatagggctattcaaattttgttaaatatgccttaaaattgaatccaagtcacattactataataaaattagcattatcattgatgt

SEQ ID NO: 4486 - DNA, 431 bp, Homo sapiens
  misc_feature 60, 240, 260, 412, 417: n = A,T,C or G
ggcttgaaaatttttatttaacctcagcaaatattggaaatagaaaaatgaattctgcanaatttcacaaataaattttccaatttccactaacaaatgttatcattcaatggctaagcagttataatgctatgaacattcaccacaatgaatgtgctgaaatagaaaacaggcaaagagacattaaaatattacttacaacagcattattacaacatattttctttaaaattccaacgnggatttcatcacttcaaaanatatacagcatttccattatatttgcaaacttaaccttatacatcttttaaaatcttgaaaattttttaagctgtctaaaaagcacttagcaaagtcgataagtctacctaatggaatactatccaccccggtataaatttcgttttagganaaggnggctgtaaacactc

SEQ ID NO: 4487 - DNA, 428 bp, Homo sapiens
  misc_feature 42, 118, 235, 268, 281, 286, 325, 377, 392, 410: n = A,T,C or G
gaacataaacagggttagctgaagcagctttattgcaatctnttcaagttagcatattacagtttaaatatttatgcctgtaaagatctgcataatctacaatacagagttatttcanaagcagttgacttaactagttgagaacaaaaacaacaaacttcaacgcaaagctataataattatctgaaacttatttacaattaaacatttagggtcctgatttacaaaactcagngcctttcatgatttattgatgagttttataganaaagtaagcagtntgtanaatattccccaggtaaaatctggagtgaatggcttttanaggaaagtctatcagtatgcttaactaaaaactaaagagtgacaaaactgtntacagcagcaatcanaataacaggccacaaganaagaacgccatttttgac

SEQ ID NO: 4488 - DNA, 406 bp, Homo sapiens
  misc_feature 10, 12, 24, 29, 40, 63, 70, 79, 112, 147, 157, 170, 184,195, 239, 244, 305, 319, 361, 366: n = A,T,C or G
actttgaaananttttattggctngtaanacctttgcatntaaaaaaaatacccaaaacactntgcagtnttaaatcanaattacatttttttaccaattaaaactacccanaatatacattttttaaagaaaagaaaatcctacanaactgaattntgaaatgacattntgacttaaatactntgacaaaatanataattccttataacattaattcattgcacaaagctgccaggtnttttnataagcataaccgctgcaccgagtgcaaatgaacccaatttcaaagttacccatttattcnaaagaactgccccnccacctatggaacttttaaatttctggcccaaaatgttggtntgttntaacttccaccaggcaaccaactttgcaatccactaactt

SEQ ID NO: 4489 - DNA, 472 bp, Homo sapiens; identical to SEQ ID NO: 3025

SEQ ID NO: 4490 - DNA, 550 bp, Homo sapiens; identical to SEQ ID NO: 3386
  misc_feature 257, 258, 421, 438: n = A,T,C or G

SEQ ID NO: 4491 - DNA, 460 bp, Homo sapiens; identical to SEQ ID NO: 632
  misc_feature 445: n = A,T,C or G

SEQ ID NO: 4492 - DNA, 460 bp, Homo sapiens; identical to SEQ ID NO: 787
  misc_feature 161, 190, 301, 316, 317, 380, 397, 398, 420: n = A,T,C or G

SEQ ID NO: 4493 - DNA, 51 bp, Homo sapiens; identical to SEQ ID NO: 804

SEQ ID NO: 4494 - DNA, 273 bp, Homo sapiens; identical to SEQ ID NO: 745

SEQ ID NO: 4495 - DNA, 129 bp, Homo sapiens
atacgactcactatagggcgaattgggccctctagatgcatgctcgagcggccgccagtgtgatggatatctgcagaattcgcccttacactatcggaataagggcgaattccagcacactggcggcag

SEQ ID NO: 4496 - DNA, 130 bp, Homo sapiens
aatacgactcactatagggcgaattgggccctctagatgcatgctcgagcggccgccagtgtgatggatatctgcagaattcgcccttacactatcggaataagggcgaattccagcacactggcggcag

SEQ ID NO: 4497 - DNA, 439 bp, Homo sapiens; identical to SEQ ID NO: 639

SEQ ID NO: 4498 - DNA, 338 bp, Homo sapiens; identical to SEQ ID NO: 549

SEQ ID NO: 4499 - DNA, 507 bp, Homo sapiens; identical to SEQ ID NO: 1441
  misc_feature 480: n = A,T,C or G

SEQ ID NO: 4500 - DNA, 504 bp, Homo sapiens; identical to SEQ ID NO: 723
  misc_feature 493: n = A,T,C or G

SEQ ID NO: 4501 - DNA, 469 bp, Homo sapiens; identical to SEQ ID NO: 581

SEQ ID NO: 4502 - DNA, 260 bp, Homo sapiens
taagctcgcccggagaacggggaggaatatgctgtggagctcctctgccatataaacaaaaagaggaaatctttcaaacatggctgtagcaaagacccactggcttggagcagccctgtctcttatccctttaattttcctcatctctggggctgaagcagcttcatttcagagaaaccagctgcttcagaaagaaccagacctcaggttggaaaatgtccaaaagtttcccagtcctgaaatgatcagggctttggagt

SEQ ID NO: 4503 - DNA, 527 bp, Homo sapiens; identical to SEQ ID NO: 591

SEQ ID NO: 4504 - DNA, 464 bp, Homo sapiens; identical to SEQ ID NO: 538

SEQ ID NO: 4505 - DNA, 564 bp, Homo sapiens
ttttacagatacccccagaagacttaattgagatgctcaaaactggggagaagccgaatggatcagtggaaccggagcgggagcttgaccttcctgttgacctagatgacatctcagaggctgacttagaccatccagacctgttccaaaataggatgctctccaagagtggctaccctaaaacacctggtcgtgctgggactgaggccctaccagacgggctcagtgttgaggatattttaaatcttttagggatggagagtgcagcaaatcagaaaacgtcgtattttcccaatccatataaccaggagaaagttctgccaaggctcccttatggtgctggaagatctagatcgaaccagcttcccaaagctgcctggattccacatgttgaaaacagacagatggcatatgaaaacctgaacgacaaggatcaagaattaggtgagtacttggccaggatgctagttaaataccctgagatcattaattcaaaccaagtgaagcgagttcctggtcaaggctcatctgaagatgacctgcaggaagaggaacaaattgagc

SEQ ID NO: 4506 - DNA, 197 bp, Homo sapiens
  misc_feature 135, 140: n = A,T,C or G
aactatcaagaactttgtttaaaaaggtgttaagaatactgaaagaatcaaaatatgtccttaaaactggcaaagttttttcttttttaagtttgagggcctattcgcagtatcttatctcttcttccgtttatnctttnctataaaaatttctgctcattcttaacattttctaaacacagtagcttagataacag

SEQ ID NO: 4507 - DNA, 392 bp, Homo sapiens; identical to SEQ ID NO: 669

SEQ ID NO: 4508 - DNA, 295 bp, Homo sapiens; identical to SEQ ID NO: 686

SEQ ID NO: 4509 - DNA, 315 bp, Homo sapiens
  misc_feature 305, 314: n = A,T,C or G
actttaggtaggcaaagaaatctggttatttatgtaaaaactagtctaataaagttagttagtggctttatcactttaaatctttagtgtccaaaagtggtgtttaaagtaatagcacatcagaaaaccttgtctggacaaaactagttcactcactgcttctgcacctgcagttgctccctttagggttataaaataatgacccaaatgttacatgtgttgatattataacttgtcagttactgatgtctgtggtatcctaccctcatctctgaaagggataatactgaataattattagaaanctataaaant

SEQ ID NO: 4510 - DNA, 447 bp, Homo sapiens; identical to SEQ ID NO: 673
  misc_feature 376: n = A,T,C or G

SEQ ID NO: 4511 - DNA, 498 bp, Homo sapiens; identical to SEQ ID NO: 769

SEQ ID NO: 4512 - DNA, 449 bp, Homo sapiens; identical to SEQ ID NO: 748

SEQ ID NO: 4513 - DNA, 169 bp, Homo sapiens
acttttcaagccactggagggagaaatggaaaacatgaaaacagcaatcttcttatgcttctgaataatcaaagactaatttgtgattttactttttaatagatatgactttgcttccaacatggaatgaaataaaaaataaataataaaagattgccatgaatcttgc

SEQ ID NO: 4514 - DNA, 449 bp, Homo sapiens; identical to SEQ ID NO: 756

SEQ ID NO: 4515 - DNA, 555 bp, Homo sapiens; identical to SEQ ID NO: 620
  misc_feature 519: n = A,T,C or G

SEQ ID NO: 4516 - DNA, 401 bp, Homo sapiens; identical to SEQ ID NO: 683

SEQ ID NO: 4517 - DNA, 628 bp, Homo sapiens
  misc_feature 13, 620: n = A,T,C or G
aattaaggccccntttctttggtaaggcccttccctgaaaccaaaccattttcttttaatggggtttctgggggtccaactatggccacttctacgctttcctgagggtattcttttgtgatgtctgcacctgtttcttcttttctttcagaggcagaagacagagccctgtttcctcatccttaatgcatctttcttttagttgcagataggtaagattttcttcagtgttggggtcaaaaaatcctttggtatcatcacttggatctgagagaatctcactgagttcctcattgaaatagcccctcttatatgctatgtcaactggtaaacgatggctctcctttgggtcaatgatccccccggttgcgatctgtgcttctaataagcgaataccgtggcccttttcgatgagttccttattcatggcttggaacaaagagatgatgtttcctgtttcaggatcattatacccagtgacagctcgttctgcagacaggagcttctctttgaactcaatgcccaccagacctctcttgtaggcttcctccactggtaacctcaagttgctaacaggatccactataaagccagtagctgcttgggcttccagcaactcnagagcagt

SEQ ID NO: 4518 - DNA, 414 bp, Homo sapiens; identical to SEQ ID NO: 2367

SEQ ID NO: 4519 - DNA, 212 bp, Homo sapiens; identical to SEQ ID NO: 2407

SEQ ID NO: 4520 - DNA, 559 bp, Homo sapiens
  misc_feature 171, 172, 459, 498, 529, 551: n = A,T,C or G
acatatattattttgatgtattaagatgaatattgctgatttaaattttatttatgcacatacttaaaggacagaaatgtctgggaaagtaattgttaaataatgatatgtaactttttaactttttaaataaataacaagatttttaatgtgtgtctccctcagggttgnntaaagttttttttctccctcaagtataaatagtggtaactatatgttttgtatcttctagcaccaactgctgtaaagcaatgctgcaaataatgcttgaatacaagtggctaagccaacaacagaataaatacttttatagtagttttataatcctgaaattcgaaagctttcccaattgcacttgcatctaaacaaaactgttgcagtttttactctatttattttgttccccatgtttatgaaagtcctgcacagtttcaaaggcatggtaaataatatatcaangtttatgtagtctgttacagaaacagctatagataacantatccagtgaagagcaaaattcaagctttanaaaatattcatgcatgcaattntgacatat

SEQ ID NO: 4521 - DNA, 299 bp, Homo sapiens
  misc_feature 173, 279, 280: n = A,T,C or G
gtcaactgtcatttttagattgaggataactataacattactgaatggattattattcttcagtgcgatacactctgatattcagccttgccctgagttaatcaaatcactggagaacaaaagcgaataacagcaggtctctcttttttattccaatttcttacatttattgncaatgatgaattcagatgccagcggcctgcctagaaagccactcttaagcaacaaggagtctgccaatccacttaaaaaacaaaccacaagagaaaaaaatccaanncctctatgttaatgaagca

SEQ ID NO: 4522 - DNA, 390 bp, Homo sapiens; identical to SEQ ID NO: 853

SEQ ID NO: 4523 - DNA, 173 bp, Homo sapiens; identical to SEQ ID NO: 1905

SEQ ID NO: 4524 - DNA, 504 bp, Homo sapiens; identical to SEQ ID NO: 1255

SEQ ID NO: 4525 - DNA, 363 bp, Homo sapiens; identical to SEQ ID NO: 601
  misc_feature 165: n = A,T,C or G

SEQ ID NO: 4526 - DNA, 391 bp, Homo sapiens
ccctcacagaacatgggctttgagggtgggagccaagaggcagacttgggagtgcccgaggccttgttctgaaacacctggggggctgacacccccactaccctcacacccctaccaccagtttccccaccagcgatgatggtagctactcagccagtgggctcctatatgcggttacacgtcagaatggcctgggaggcaggtgccagtaattatccctatattacccatgagaaactgaggaacacagatgttaagtaagttgctcaaggtgatcagccagcaagggtcagagcgaacgggattggtaacatctcctcatgtgaaacaggctgttatcatattcagagggggtcggtctcactgtgaactgtccaagcaggggcctctg

SEQ ID NO: 4527 - DNA, 472 bp, Homo sapiens; identical to SEQ ID NO: 642

SEQ ID NO: 4528 - DNA, 410 bp, Homo sapiens; identical to SEQ ID NO: 740

SEQ ID NO: 4529 - DNA, 305 bp, Homo sapiens; identical to SEQ ID NO: 2378

SEQ ID NO: 4530 - DNA, 457 bp, Homo sapiens; identical to SEQ ID NO: 2390
  misc_feature 456: n = A,T,C or G

SEQ ID NO: 4531 - DNA, 304 bp, Homo sapiens; identical to SEQ ID NO: 2420

SEQ ID NO: 4532 - DNA, 285 bp, Homo sapiens
ggtgtttgtagcgccactttactgccaatagctgacattgccctgggttaggggagaataaataaaatctgtggcatcagacaggtattaccgaggcgaagagtggactgggctttcgtgggcacttaccctgggaagggggtatgaggtggctggagaagtgttcatggagagtgtctctctcctgcccccaaggccacggaatcttctattccttctttgtacccaaagggcaaagtggaggccagggtctctttgctaaggagctaagtaggggaaagaggc

SEQ ID NO: 4533 - DNA, 185 bp, Homo sapiens; identical to SEQ ID NO: 2412
  misc_feature 171: n = A,T,C or G

SEQ ID NO: 4534 - DNA, 704 bp, Homo sapiens
  misc_feature 490, 492, 504, 511, 535, 587, 604, 615, 624, 640, 649, 654: n = A,T,C or G
gatgctttccccaacatatcttcagatgagtcttatactttacttgtgaaagaaccagtggctgtccttaaggccaacagagtttggggagcattacgaggtttagagacctttagccagttagtttatcaagattcttatggaactttcaccatcaatgaatccaccattattgattctccaaggttttctcacagaggaattttgattgatacatccagacattatctgccagttaagattattcttaaaactctggatgccatggcttttaataagtttaatgttcttcactggcacatagttgatgaccagtctttcccatatcagagcatcacttttcctgagttaagcaataaaggaagctattctttgtctcatgtttatacaccaaatgatgtccgtatggtgattgaatatgccagattacgaggaattcgagtcctgccagaatttgatacccctgggcatacactatcttggggaaaangncaaaaagacctnctgactncatgttacagtaaacaaaacaagntggactcttttggacctataaaccctactctgaatacacatacaagctttcnttctacattttttcaanaaaataagganggggtttcngatcaatcattctttnggaggaaangaagnggaatttaatgttgggaatcaatccaaaattcaaaattcttgaggcaaaa

SEQ ID NO: 4535 - DNA, 482 bp, Homo sapiens
  misc_feature 442: n = A,T,C or G
gagcggccgcccgggcaggtmycacattccaagaaacttttgactattttgttcattaatgatgtgtctataaaaatgccttgcacatagttgttcaataaatattagttgagtgtattaataaaggataagacagaaaactttaaaactgagtagcaaaagacaagattgaaaaccaactakcaaaaaatatttagagcaaataatgcatrtcctaatatgtaaagatcttacatatcaacatgtaggacattaacaccttttagtgagtgaagaaagtgaccgaaaagataaaatggctaataaacatgaaaaagttttawtcttgctagtcagambgaaatgtaaatttggaaggtgagactactgtttctcatctctcaattaggtgagggtaaaaastaatttttcttggtcamyggtgtagcatgatgggagtgtnaattggtgcatacttaaaagtgtcaaatgttcctaccctg

SEQ ID NO: 4536 - DNA, 475 bp, Homo sapiens
  misc_feature 458: n = A,T,C or G
agcgtggtcgcggccgaggtaaggagaagcagcggcgtcgctgcaagccaaagaagcccacccgccgtgacgcgtccccggagtccccttccaaaaagggacccatccccatccggcgtcactaatggaggacgccgtccagattctccttgttttcatggattcaggtgctggagaatctggtaaaagcaccattgtgaagcagatgaggatcctgcatgttaatgggtttaatggagagggcggcgaagaggacccgcaggctgcaaggagcaacagcgatggtgagaaggcaaccaaagtgcaggacatcaaaaacaacctgaaagaggcgattgaaaccattgtggccgccatgagcaacctggtgccccccgtggagctggccaaccccgagaaccagttcagagtggactacattctgagtgtgatgaacgtgcctgactttgacttccctnccgaattctatgagcat

SEQ ID NO: 4537 - DNA, 446 bp, Homo sapiens
agcgtggtcgcggccgaggttgaccatccatatccaatgttctcatttaaacattacccagcatcattgtttataatcagaaactctggtccttctgtctggtggcacttagagtcttttgtgccataatgcagcagtatggagggaggattttatggagaaatggggatagtcttcatgaccacaaataaataaaggaaaactaagctgtattgtgggttttgaaaaggttattatacttcttaacaattcttttttttcagggacttttctagctgtatgactgttacttgaccttctttgaaaagcattcccaaaatgctctattttagatagattaacattaaccaacataattttttttagatcgagtcggcataaatttctaagtcagcctctagtcgtggttcatctctttcacctgcattttatttggtgtttgtctg

SEQ ID NO: 4538 - DNA, 251 bp, Homo sapiens
tcgagcggccgcccgggcaggtacctatattatatgattccaaattgtgtgaggaaagtaaaaggctaacactgaaaaataactagcatactatgttcattttcaggtcttagggaaaataacatccaataaattaaatcaktatggcttacttcatttatttatgtatgcttcacagctgcagcattcatacatgaacattcaaaactttataaaagattaaaatggttatatatacaaaatttcttttt

SEQ ID NO: 4539 - DNA, 290 bp, Homo sapiens
tcgagcggccgcccgggcaggtacattgattagttagggtggggcgggaacaaatcacaatggtggaatgtcatcagttaaggctatgtttacttcttttgtggatcttcagttacttcaggccacgtggatgtatacgtgcaagtcacaggggatgcgatggcttggcttgggctcagaggcctgacattcctgccttcttatattaataagaaaaataaaacaaaatagtgttgaagtcttggggcggtgaaaatttgtgggggttggtgtggagagagaatgggcga

SEQ ID NO: 4540 - DNA, 271 bp, Homo sapiens
agcgtggtcgcggccgaggtacagtgatagctccccctgggcaatacaatacaagaacagtgggttttgtcaaattggaacaaggaaacagaaccacagaaataaatacattggttaacatcagattagttcaggttacttttttgtaaaagttaaagtagaggggacttctgtattatgctaactcaagtagactggaatctcctgtgttcttttttttttaaattggytttaattttttttaattggatctatcttcttccttaacatt

SEQ ID NO: 4541 - DNA, 416 bp, Homo sapiens
cagcgtggtcgcggccgaggtacactccatgcttcttgaaaacttctgctgtgatggggacggtggaattaaccggattggcaatgacgcagatcatggcttccgggcagtgctgggcacaggcagcggtcagggtggccacaatcgtggcattggtgttgaacaggtcgtcccgggtcatgcctggctttctggggactccagccggaataactaccacatcacaacctttcaggcagtcaggcagctgttcaggtccgaggtagcctttcacagcggctttggtctcgatgtggctcagatctgcggccactccgggtgtgtgcgcgatatcatagagggtcaggcggctcaccaaggggctgttcttcaggagaagtgaaagtggctgcccacctgcccgggcggccgctcga

SEQ ID NO: 4542 - DNA, 766 bp, Homo sapiens
  misc_feature 7, 8, 41, 309, 357, 458, 480, 502, 525, 530, 536, 539, 551,578, 619, 639, 656, 664, 666, 694, 730, 753: n = A,T,C or G
ccgggcnngtactatctggtttgagagtgcccttgaaaatntcatactgcttagagtttcctttatttccgaacaaagaaactagtatgtgtcctgtaaccttttttccagacagtgtgacagataccttatacctccaacgtgcaaaattactggcatcaccagtgtctagataaaatttctggcccacatcatttgttttcccaggatatctatcagcatagtgacccatctgtgggcagcctccacttggacaagggaaacacttgtttgcagtgaagacgttgtaagaggcacaggggaatccancaaagccatcagggttgacgatgctatcagtgtaatatttgtagcttnttaagtgattacaggccgcaaagtctcgagtcccttcccagattccgctatgtccacaatctgagagagaatgttctttttacatccaggcatttccactnctccatttggaaagaaatctangtgggccccgacttggtcattncaaaccccaaattggggactatnggggnaccatncgngtgaattacatncacaaattggcatccttggggtcaatnggctaatcagggtgcctgaaagcaaggtctgctgggtccanccttggatgcgtccaagggnccatgggtttccttcanctccccananggggggatccagggtggggccatgactnccctttgaagggggaaccgacccccccgaaaaaatnaaaaaaattccctttttgttccncaaacttattttt

SEQ ID NO: 4543 - DNA, 558 bp, Homo sapiens
  misc_feature 460: n = A,T,C or G
tgagcggccgcccgggcaggtctctgtctgacctgacaagccacctcaagtggacaaggcacttaccaacagagattgctgatttgctccttaagcaagagattcactgccgctaagcatggctcagaccaactcgttcttcatgctgatctcctccctgatgttcctgtctctgagccaaggccaggagtcccagacagagctgcctaatccccgaatcagctgcccagaaggcaccaatgcctatcgctcctactgctactactttaatgaagaccctgagacctgggttgatgcagatctctattgccagaacatgaattcaggcaacctggtgtctgtgctcacccaggcggagggtgccttcgtggcctcactgattaaggagagtagcactgatgacagcaatgtctggattggcctccatgacccaaaaagaaccgccgctggcactggagtnagtgggtccctggtctcctacaagtcctgggacactggatccccgagcagtgctaatgctggctactgtgcaagcctgacttcatgctcaggattcaa

SEQ ID NO: 4544 - DNA, 607 bp, Homo sapiens
cgtggtcgcggccgaggtacacttgaaaccaaatttctaaaacttgtttttcttaaaaaatagttgttgtaacattaaaccataacctaatcagtgtgttcactatgcttccacactagccagtcttctcacacttcttctggtttcaagtctcaaggcctgacagacagaagggcttggagattttttttctttacaattcagtcttcagcaacttgagagctttcttcatgttgtcaagcaacagagctgtatctgcaggttcgtaagcatagagacggtttgaatatcttccagtgatatcggctctaactgtcagagatgggtcaacaaacataatcctggggacatactggccatcaggagaaaggtgtttgtcagttgtttcataaaccagattgaggaggacaaactgctctgccaatttctggatttctttattttcagcaaacactttctttaaagcttgactgtgtgggcactcatccaagtgatgaataatcatcaagggtttgttgcttgtcttggatttatatagagcttcttcatatgtctgagtccagatgagttggtcaccccaacctctggagagggtctggggcagttt

SEQ ID NO: 4545 - DNA, 277 bp, Homo sapiens
cagcgtggtcgcggccgaggtacagagtcttttgcttcctcccacccctagggggaaaaactgctttgtgctttgggaagttgtctctgaaacccggggacagaggacgcaggacagactaggagggagccgggaggatgggctgcagctgtggaggagggtttcagaggagagaggtcggagagcagaggcctgagaagccagaggcaggtggagagagggtggaaagtgagcagcgggctgggctggagccgcaacctgcccgggcggccgctcg

SEQ ID NO: 4546 - DNA, 387 bp, Homo sapiens
agcgtggtcgcggccgaggtacaccactgtgcctgctttgaatcctttacgaagagaaaaaaaaattaaagaaagcctttagatttatccaatgtttactactgggattgcttaaagtgaggcccctccaacaccagggggttaattcctgtgattgtgaaaggggctacttccaaggcatcttcatgcaggcagccccttgggagggcacctgagagctggtagagtctgaaattagggatgtgagcctcgtggttactgagtaaggtaaaattgcatccaccattgtttgtgataccttagggaattgcttggacctggtgacaagggctcctgttcaatagtggtgttggggagagagagagcagtgattatagaccgagagag

SEQ ID NO: 4547 - DNA, 1320 bp, Homo sapiens
ccacgcgtccgggcgcgcgggtgaaaggcgcattgatgcagcctgcggcggcctcggagcgcggcggagcagacgctgaccacgttcctctcctcggtctcctccgcctccagctccgcgctgcccggcagccgggagccatgcgaccccagggccccgccgcctccccgcagcggctccgcggcctcctgctgctcctgctgctgcagctgcccgcgccgtcgagcgcctctgagatccccaaggggaagcaaaaggcgcagctccggcagagggaggtggtggacctgtataatggaatgtgcttacaagggccagcaggagtgcctggtcgagacgggagccctggggccaatggcattccgggtacacctgggatcccaggtcgggatggattcaaaggagaaaagggggaatgtctgagggaaagctttgaggagtcctggacacccaactacaagcagtgttcatggagttcattgaattatggcatagatcttgggaaaattgcggagtgtacatttacaaagatgcgttcaaatagtgctctaagagttttgttcagtggctcacttcggctaaaatgcagaaatgcatgctgtgagcgttggtatttcacattcaatggagctgaatgttcaggacctcttcccattgaagctataatttatttggaccaaggaagccctgaaatgaattcaacaattaatattcatcgcacttcttctgtggaaggactttgtgaaggaattggtgctggattagtggatgttgctatctgggttggcacttgttcagattacccaaaaggagatgcttctactggatggaattcagtttctcgcatcattattgaagaactaccaaaataaatgctttaattttcatttgctacctctttttttattatgccttggaatggttcacttaaatgacattttaaataagtttatgtatacatctgaatgaaaagcaaagctaaatatgtttacagaccaaagtgtgatttcacactgtttttaaatctagcattattcattttgcttcaatcaaaagtggtttcaatattttttttagttggttagaatactttcttcatagtcacattctctcaacctataatttggaatattgttgtggtcttttgttttttctcttagtatagcatttttaaaaaaatataaaagctaccaatctttgtacaatttgtaaatgttaagaattttttttatatctgttaaataaaaattatttccaaaaaaaaaaaaaaaaaaaaaaaaaaaaaaaaaaaaaaaaaaaaaaaaaaaaaaaaaaaaaaaa

SEQ ID NO: 4548 - DNA, 2480 bp, Homo sapiens
ggcacgaggcacgctggttttccggggccgctccatcgcgccttcctcctgcgcctcgcttctccggtccagccgccatcttcctttccgcacaggggccgccgagcggggccatgcagccaacgctgcttctcagcctcctgggagccgtggggctggcggctgtcaattccatgccagtggataacaggaaccacaatgaaggaatggtgactcgctgcatcattgaggtcctctcaaatgccttgtcgaagtccagcgctccacccatcacccctgagtgccgccaagtcctgaagacgagtagaaaagacgtcaaagacaaagagacaactgaaaatgaaaacacaaagtttgaagtaagattgttaagagacccagctgatgcctcggaagcccacgagtcctccagcaggggagaggcaggagccccaggggaggaggacatccaaggcccaacaaaggcagacacagagaaatgggcagagggaggcgggcacagccgagagcgagcggatgagccccagtggagcctctatccctccgacagccaagtctctgaagaagtgaagacacgccattctgagaagagccagagagaggatgaggaggaggaggagggagagaactatcaaaaaggggagcgaggggaagatagcagtgaagagaaacaccttgaagagccaggagagacacaaaacgcttttctcaatgaaagaaagcaggcttcagctataaaaaaagaggagttagtggccagatcggaaacacatgctgccgggcattctcaggagaagacacatagccgagagaagagtagccaggagagtggagaggaggcagggagccaggagaatcacccccaggagtctaaaggccaaccccgaagccaggaagaatctgaggaaggtgaggaagatgccacctctgaggtggacaaacgacgcacgaggcccagacaccaccacgggaggagcaggcccgacaggtcctctcaaggagggagtcttccctctgaggaaaagggacacccccaggaggaatctgaggagtcaaacgtcagcatggccagtttaggggaaaagagggaccaccattcaacccactacagggcttcagaggaagaacctgaatatggagaagaaataaagggttatccaggcgtccaggcccctgaggacctggagtgggagcgctataggggcagaggaagtgaagaatacagggctccaagacctcagagtgaggagagttgggatgaggaggacaagagaaactaccccagcttagagcttgataagatggcacatggatatggtgaagaaagtgaggaagagaggggccttgagccgggaaagggacgccatcacagaggcaggggaggggagccacgtgcctatttcatgtctgacaccagagaagagaaaaggttcttgggtgaaggacaccaccgtgtccaagaaaaccagatggacaaggcaaggaggcatccacaaggtgcgtggaaagagctggacagaaattatctcaactacggtgaggaaggagccccagggaagtggcagcagcagggagacctgcaggacactaaagaaaacagggaggaagctaggtttcaagataaacaatatagctcccatcacacagctgaaaagaggaagagattaggggaactgttcaacccatactacgaccctctccagtggaagagcagccattttgaaagaagagacaacatgaatgacaattttctcgagggtgaggaggaaaatgagctgaccttgaacgagaagaatttcttcccagaatacaactatgactggtgggagaaaaagcccttctctgaggatgtgaactgggggtatgagaagagaaacctcgccagggtccccaagctggacctgaaaaggcaatatgacagggtggcccaactggaccagctccttcactacaggaagaagtcagctgagtttccagacttctatgattctgaggagccggtgagcacccaccaggaggcagaaaatgaaaaggacagggctgaccagacagtcctgacagaggacgagaaaaaagaactcgaaaacttggctgcaatggatttggaactacagaagatagctgagaaattcagccaaaggggctgactgtcattggagcggtgggcactgttaagaagcagccatcacatgatctgtttttcaccacttcactgaaagacaccatttatatacccaagggcagaaagtagaacttactattcattaaatgtttgacacaattggaattgtctttaatttctgtcagaatgctattgaaaatgtgaattgcatgacttgtagcatattcttttctgcaaaatagacatattaacatgcttatgacaatgactgtgctactgtctttggaaaaatgtttgtctcagttggaaataataaaagattcacctgagaccaaaaaaaaaaaaaaaaaaaaaaaaa

SEQ ID NO: 4549 - DNA, 3849 bp, Homo sapiens
ggcacgagggtcttcccctcgtgggccctgagcgggactgcagccagccccctggggcgccagctttggaggcccccgacagctgctctcgggagccgcctcccgacacccgagccccgccggcgcctcccgctcccggctcccggctcctggctccctccgcctcccccgcccctcgccccgccgccgaagaggccccgctcccgggtcggacgcctgggtctgccgggaagagcgatgagaggtgtctgaaggtggctattcactgagcgatggggttggacttgaaggaatgccaagagatgctgcccccacccccttaggcccgagggatcaggagctatgggaccagaggccctgtcatctttactgctgctgctcttggtggcaagtggagatgctgacatgaagggacattttgatcctgccaagtgccgctatgccctgggcatgcaggaccggaccatcccagacagtgacatctctgcttccagctcctggtcagattccactgccgcccgccacagcaggttggagagcagtgacggggatggggcctggtgccccgcagggtcggtgtttcccaaggaggaggagtacttgcaggtggatctacaacgactgcacctggtggctctggtgggcacccagggacggcatgccgggggcctgggcaaggagttctcccggagctaccggctgcgttactcccgggatggtcgccgctggatgggctggaaggaccgctggggtcaggaggtgatctcaggcaatgaggaccctgagggagtggtgctgaaggaccttgggccccccatggttgcccgactggttcgcttctacccccgggctgaccgggtcatgagcgtctgtctgcgggtagagctctatggctgcctctggagggatggactcctgtcttacactgcccctgtggggcagacaatgtatttatctgaggccgtgtacctcaacgactccacctatgacggacataccgtgggcggactgcagtatgggggtctgggccagctggcagatggtgtggtggggctggatgactttaggaagagtcaggagctgcgggtctggccaggctatgactatgtgggatggagcaaccacagcttctccagtggctatgtggagatggagtttgagtttgaccggctgagggccttccaggctatgcaggtccactgtaacaacatgcacacgctgggagcccgtctgcctggcggggtggaatgtcgcttccggcgtggccctgccatggcctgggagggggagcccatgcgccacaacctagggggcaacctgggggaccccagagcccgggctgtctcagtgccccttggcggccgtgtggctcgctttctgcagtgccgcttcctctttgcggggccctggttactcttcagcgaaatctccttcatctctgatgtggtgaacaattcctctccggcactgggaggcaccttcccgccagccccctggtggccgcctggcccacctcccaccaacttcagcagcttggagctggagcccagaggccagcagcccgtggccaaggccgaggggagcccgaccgccatcctcatcggctgcctggtggccatcatcctgctcctgctgctcatcattgccctcatgctctggcggctgcactggcgcaggctcctcagcaaggctgaacggagggtgttggaagaggagctgacggttcacctctctgtccctggggacactatcctcatcaacaaccgcccaggtcctagagagccacccccgtaccaggagccccggcctcgtgggaatccgccccactccgctccctgtgtccccaatggctctgcctacagtggggactatatggagcctgagaagccaggcgccccgcttctgcccccacctccccagaacagcgtcccccattatgccgaggctgacattgttaccctgcagggcgtcaccgggggcaacacctatgctgtgcctgcactgcccccaggggcagtcggggatgggccccccagagtggatttccctcgatctcgactccgcttcaaggagaagcttggcgagggccagtttggggaggtgcacctgtgtgaggtcgacagccctcaagatctggttagtcttgatttcccccttaatgtgcgtaagggacaccctttgctggtagctgtcaagatcttacggccagatgccaccaagaatgccaggaatgatttcctgaaagaggtgaagatcatgtcgaggctcaaggacccaaacatcattcggctgctgggcgtgtgtgtgcaggacgaccccctctgcatgattactgactacatggagaacggcgacctcaaccagttcctcagtgcccaccagctggaggacaaggcagccgagggggcccctggggacgggcaggctgcgcaggggcccaccatcagctacccaatgctgctgcatgtggcagcccagatcgcctccggcatgcgctatctggccacactcaactttgtacatcgggacctggccacgcggaactgcctagttggggaaaatttcaccatcaaaatcgcagactttggcatgagccggaacctctatgctggggactattaccgtgtgcagggccgggcagtgctgcccatccgctggatggcctgggagtgcatcctcatggggaagttcacgactgcgagtgacgtgtgggcctttggtgtgaccctgtgggaggtgctgatgctctgtagggcccagccctttgggcagctcaccgacgagcaggtcatcgagaacgcgggggagttcttccgggaccagggccggcaggtgtacctgtcccggccgcctgcctgcccgcagggcctatatgagctgatgcttcggtgctggagccgggagtctgagcagcgaccacccttttcccagctgcatcggttcctggcagaggatgcactcaacacggtgtgaatcacacatccagctgcccctccctcagggagcgatccaggggaagccagtgacactaaaacaagaggacacaatggcacctctgcccttcccctcccgacagcccatcacctctaatagaggcagtgagactgcaggtgggctgggcccacccagggagctgatgccccttctccccttcctggacacactctcatgtccccttcctgttcttccttcctagaagcccctgtcgcccacccagctggtcctgtggatgggatcctctccaccctcctctagccatcccttggggaagggtggggagaaatataggatagacactggacatggcccattggagcacctgggccccactggacaacactgattcctggagaggtggctgcgcccccagcttctctctccctgtcacacactggaccccactggctgagaatctgggggtgaggaggacaagaaggagaggaaaatgtttccttgtgcctgctcctgtacttgtcctcagcttgggcttcttcctcctccatcacctgaaacactggacctgggggtagccccgccccagccctcagtcacccccacttcccacttgcagtcttgtagctagaacttctctaagcctatacgtttctgtggagtaaatattgggattggggggaaagagggagcaacggcccatagccttggggttggacatctctagtgtagctgccacattgatttttctataatcacttggggtttgtacatttttggggggagagacacagatttttacactaatatatggacctagcttgaggcaattttaatcccctgcactaggcaggtaataataaaggttgagttttccacaaaaaaaaaaaaaaaaaa

SEQ ID NO: 4550 - DNA, 2533 bp, Homo sapiens
ggagctcaagctcctctacaaagaggtggacagagaagacagcagagaccatgggacccccctcagcccctccctgcagattgcatgtcccctggaaggaggtcctgctcacagcctcacttctaaccttctggaacccacccaccactgccaagctcactattgaatccacgccattcaatgtcgcagaggggaaggaggttcttctactcgcccacaacctgccccagaatcgtattggttacagctggtacaaaggcgaaagagtggatggcaacagtctaattgtaggatatgtaataggaactcaacaagctaccccagggcccgcatacagtggtcgagagacaatataccccaatgcatccctgctgatccagaacgtcacccagaatgacacaggattctataccctacaagtcataaagtcagatcttgtgaatgaagaagcaaccggacagttccatgtatacccggagctgcccaagccctccatctccagcaacaactccaaccccgtggaggacaaggatgctgtggccttcacctgtgaacctgaggttcagaacacaacctacctgtggtgggtaaatggtcagagcctcccggtcagtcccaggctgcagctgtccaatggcaacatgaccctcactctactcagcgtcaaaaggaacgatgcaggatcctatgaatgtgaaatacagaacccagcgagtgccaaccgcagtgacccagtcaccctgaatgtcctctatggcccagatgtccccaccatttccccctcaaaggccaattaccgtccaggggaaaatctgaacctctcctgccacgcagcctctaacccacctgcacagtactcttggtttatcaatgggacgttccagcaatccacacaagagctctttatccccaacatcactgtgaataatagcggatcctatatgtgccaagcccataactcagccactggcctcaataggaccacagtcacgatgatcacagtctctggaagtgctcctgtcctctcagctgtggccaccgtcggcatcacgattggagtgctggccagggtggctctgatatagcagccctggtgtattttcgatatttcaggaagactggcagattggaccagaccctgaattcttctagctcctccaatcccattttatcccatggaaccactaaaaacaaggtctgctctgctcctgaagccctatatgctggagatggacaactcaatgaaaatttaaagggaaaaccctcaggcctgaggtgtgtgccactcagagacttcacctaactagagacagtcaaactgcaaaccatggtgagaaattgacgacttcacactatggacagcttttcccaagatgtcaaaacaagactcctcatcatgataaggctcttacccccttttaatttgtccttgcttatgcctgcctctttcgcttggcaggatgatgctgtcattagtatttcacaagaagtagcttcagagggtaacttaacagagtgtcagatctatcttgtcaatcccaacgttttacataaaataagagatcctttagtgcacccagtgactgacattagcagcatctttaacacagccgtgtgttcaaatgtacagtggtccttttcagagttggacttctagactcacctgttctcactccctgttttaattcaacccagccatgcaatgccaaataatagaattgctccctaccagctgaacagggaggagtctgtgcagtttctgacacttgttgttgaacatggctaaatacaatgggtatcgctgagactaagttgtagaaattaacaaatgtgctgcttggttaaaatggctacactcatctgactcattctttattctattttagttggtttgtatcttgcctaaggtgcgtagtccaactcttggtattaccctcctaatagtcatactagtagtcatactccctggtgtagtgtattctctaaaagctttaaatgtctgcatgcagccagccatcaaatagtgaatggtctctctttggctggaattacaaaactcagagaaatgtgtcatcaggagaacatcataacccatgaaggataaaagccccaaatggtggtaactgataatagcactaatgctttaagatttggtcacactctcacctaggtgagcgcattgagccagtggtgctaaatgctacatactccaactgaaatgttaaggaagaagatagatccaattaaaaaaaattaaaaccaatttaaaaaaaaaaaagaacacaggagattccagtctacttgagttagcataatacagaagtcccctctactttaacttttacaaaaaagtaacctgaactaatctgatgttaaccaatgtatttatttctgtggttctgtttccttgttccaatttgacaaaacccactgttcttgtattgtattgcccagggggagctatcactgtacttgtagagtggtgctgctttaattcataaatcacaaataaaagccaattagctctataact

SEQ ID NO: 4551 - protein, 278 aa, Homo sapiens
MQPAAASERGGADADHVPLLGLLRLQLRAARQPGAMRPQGPAASPQRLRGLLLLLLLQLPAPSSASEIPKGKQKAQLRQREVVDLYNGMCLQGPAGVPGRDGSPGANGIPGTPGIPGRDGFKGEKGECLRESFEESWTPNYKQCSWSSLNYGIDLGKIAECTFTKMRSNSALRVLFSGSLRLKCRNACCERWYFTFNGAECSGPLPIEAIIYLDQGSPEMNSTINIHRTSSVEGLCEGIGAGLVDVAIWVGTCSDYPKGDASTGWNSVSRIIIEELPK

SEQ ID NO: 4552 - protein, 677 aa, Homo sapiens
MQPTLLLSLLGAVGLAAVNSMPVDNRNHNEGMVTRCIIEVLSNALSKSSAPPITPECRQVLKTSRKDVKDKETTENENTKFEVRLLRDPADASEAHESSSRGEAGAPGEEDIQGPTKADTEKWAEGGGHSRERADEPQWSLYPSDSQVSEEVKTRHSEKSQREDEEEEEGENYQKGERGEDSSEEKHLEEPGETQNAFLNERKQASAIKKEELVARSETHAAGHSQEKTHSREKSSQESGEEAGSQENHPQESKGQPRSQEESEEGEEDATSEVDKRRTRPRHHHGRSRPDRSSQGGSLPSEEKGHPQEESEESNVSMASLGEKRDHHSTHYRASEEEPEYGEEIKGYPGVQAPEDLEWERYRGRGSEEYRAPRPQSEESWDEEDKRNYPSLELDKMAHGYGEESEEERGLEPGKGRHHRGRGGEPRAYFMSDTREEKRFLGEGHHRVQENQMDKARRHPQGAWKELDRNYLNYGEEGAPGKWQQQGDLQDTKENREEARFQDKQYSSHHTAEKRKRLGELFNPYYDPLQWKSSHFERRDNMNDNFLEGEEENELTLNEKNFFPEYNYDWWEKKPFSEDVNWGYEKRNLARVPKLDLKRQYDRVAQLDQLLHYRKKSAEFPDFYDSEEPVSTHQEAENEKDRADQTVLTEDEKKELENLAAMDLELQKIAEKFSQRG

SEQ ID NO: 4553 - protein, 876 aa, Homo sapiens
MGPEALSSLLLLLLVASGDADMKGHFDPAKCRYALGMQDRTIPDSDISASSSWSDSTAARHSRLESSDGDGAWCPAGSVFPKEEEYLQVDLQRLHLVALVGTQGRHAGGLGKEFSRSYRLRYSRDGRRWMGWKDRWGQEVISGNEDPEGVVLKDLGPPMVARLVRFYPRADRVMSVCLRVELYGCLWRDGLLSYTAPVGQTMYLSEAVYLNDSTYDGHTVGGLQYGGLGQLADGVVGLDDFRKSQELRVWPGYDYVGWSNHSFSSGYVEMEFEFDRLRAFQAMQVHCNNMHTLGARLPGGVECRFRRGPAMAWEGEPMRHNLGGNLGDPRARAVSVPLGGRVARFLQCRFLFAGPWLLFSEISFISDVVNNSSPALGGTFPPAPWWPPGPPPTNFSSLELEPRGQQPVAKAEGSPTAILIGCLVAIILLLLLIIALMLWRLHWRRLLSKAERRVLEEELTVHLSVPGDTILINNRPGPREPPPYQEPRPRGNPPHSAPCVPNGSAYSGDYMEPEKPGAPLLPPPPQNSVPHYAEADIVTLQGVTGGNTYAVPALPPGAVGDGPPRVDFPRSRLRFKEKLGEGQFGEVHLCEVDSPQDLVSLDFPLNVRKGHPLLVAVKILRPDATKNARNDFLKEVKIMSRLKDPNIIRLLGVCVQDDPLCMITDYMENGDLNQFLSAHQLEDKAAEGAPGDGQAAQGPTISYPMLLHVAAQIASGMRYLATLNFVHRDLATRNCLVGENFTIKIADFGMSRNLYAGDYYRVQGRAVLPIRWMAWECILMGKFTTASDVWAFGVTLWEVLMLCRAQPFGQLTDEQVIENAGEFFRDQGRQVYLSRPPACPQGLYELMLRCWSRESEQRPPFSQLHRFLAEDALNTV

SEQ ID NO: 4554 - protein, 344 aa, Homo sapiens
MGPPSAPPCRLHVPWKEVLLTASLLTFWNPPTTAKLTIESTPFNVAEGKEVLLLAHNLPQNRIGYSWYKGERVDGNSLIVGYVIGTQQATPGPAYSGRETIYPNASLLIQNVTQNDTGFYTLQVIKSDLVNEEATGQFHVYPELPKPSISSNNSNPVEDKDAVAFTCEPEVQNTTYLWWVNGQSLPVSPRLQLSNGNMTLTLLSVKRNDAGSYECEIQNPASANRSDPVTLNVLYGPDVPTISPSKANYRPGENLNLSCHAASNPPAQYSWFINGTFQQSTQELFIPNITVNNSGSYMCQAHNSATGLNRTTVTMITVSGSAPVLSAVATVGITIGVLARVALI

SEQ ID NO: 4555 - DNA, 1362 bp, Homo sapiens
agcaactccaaggacacagttcacagaaatttggttctcagccccaaaatactgattgaattggagacaattacaaggactctctggccaaaaacccttgaagaggccccgtgaaggaggcagtgaggagcttttgattgctgacctgtgtcgtaccaccccagaatgtgcactgggggctgtgccagatgcctgggggggaccctcattccccttgctttttttggcttcctggctaacatcctgttattttttcctggaggaaaagtgatagatgacaacgaccacctttcccaagagatctggtttttcggaggaatattaggaagcggtgtcttgatgatcttccctgcgctggtgttcttgggcctgaagaacaatgactgctgtgggtgctgcggcaacgagggctgtgggaagcgatttgcgatgttcacctccacgatatttgctgtggttggattcttgggagctggatactcgtttatcatctcagccatttcaatcaacaagggtcctaaatgcctcatggccaatagtacatggggctaccccttccacgacggggattatctcaatgatgaggccttatggaacaagtgccgagagcctctcaatgtggttccctggaatctgaccctcttctccatcctgctggtcgtaggaggaatccagatggttctctgcgccatccaggtggtcaatggcctcctggggaccctctgtggggactgccagtgttgtggctgctgtgggggagatggacccgtttaaacctccgagatgagctgctcagactctacagcatgacgactacaatttcttttcataaaacttcttctcttcttggaattattaattcctatctgcttcctagctgataaagcttagaaaaggcagttattccttctttccaaccagctttgctcgagttagaattttgttattttcaaataaaaaatagtttggccacttaacaaatttgatttataaatctttcaaattagttcctttttagaatttaccaacaggttcaaagcatacttttcatgatttttttattacaaatgtaaaatgtataaagtcacatgtactgccatactacttctttgtatataaagatgtttatatctttggaagttttacataaatcaaaggaagaaagcacatttaaaatgagaaactaagaccaatttctgtttttaagaggaaaaagaatgattgatgtatcctaagtattgttatttgttgtctttttttgctgccttgcttgagttgcttgtgactgatcttttgaggctgtcatcatggctagggttcttttatgtatgttaaattaaaacctgaattcagaggtaacgt

SEQ ID NO: 4556 - DNA, 732 bp, Homo sapiens
atgcgaccccagggccccgccgcctccccgcagcggctccgcggcctcctgctgctcctgctgctgcagctgcccgcgccgtcgagcgcctctgagatccccaaggggaagcaaaaggcgcagctccggcagagggaggtggtggacctgtataatggaatgtgcttacaagggccagcaggagtgcctggtcgagacgggagccctggggccaatgttattccgggtacacctgggatcccaggtcgggatggattcaaaggagaaaagggggaatgtctgagggaaagctttgaggagtcctggacacccaactacaagcagtgttcatggagttcattgaattatggcatagatcttgggaaaattgcggagtgtacatttacaaagatgcgttcaaatagtgctctaagagttttgttcagtggctcacttcggctaaaatgcagaaatgcatgctgtcagcgttggtatttcacattcaatggagctgaatgttcaggacctcttcccattgaagctataatttatttggaccaaggaagccctgaaatgaattcaacaattaatattcatcgcacttcttctgtggaaggactttgtgaaggaattggtgctggattagtggatgttgctatctgggttggcacttgttcagattacccaaaaggagatgcttctactggatggaattcagtttctcgcatcattattgaagaactaccaaaataa

SEQ ID NO: 4557 - DNA, 837 bp, Homo sapiens
atgcagcctgcggcggcctcggagcgcggcggagcagacgctgaccacgttcctctcctcggtctcctccgcctccagctccgcgctgcccggcagccgggagccatgcgaccccagggccccgccgcctccccgcagcggctccgcggcctcctgctgctcctgctgctgcagctgcccgcgccgtcgagcgcctctgagatccccaaggggaagcaaaaggcgcagctccggcagagggaggtggtggacctgtataatggaatgtgcttacaagggccagcaggagtgcctggtcgagacgggagccctggggccaatgttattccgggtacacctgggatcccaggtcgggatggattcaaaggagaaaagggggaatgtctgagggaaagctttgaggagtcctggacacccaactacaagcagtgttcatggagttcattgaattatggcatagatcttgggaaaattgcggagtgtacatttacaaagatgcgttcaaatagtgctctaagagttttgttcagtggctcacttcggctaaaatgcagaaatgcatgctgtcagcgttggtatttcacattcaatggagctgaatgttcaggacctcttcccattgaagctataatttatttggaccaaggaagccctgaaatgaattcaacaattaatattcatcgcacttcttctgtggaaggactttgtgaaggaattggtgctggattagtggatgttgctatctgggttggcacttgttcagattacccaaaaggagatgcttctactggatggaattcagtttctcgcatcattattgaagaactaccaaaataa

SEQ ID NO: 4558 - protein, 202 aa, Homo sapiens
MCTGGCARCLGGTLIPLAFFGFLANILLFFPGGKVIDDNDHLSQEIWFFGGILGSGVLMIFPALVFLGLKNNDCCGCCGNEGCGKRFAMFTSTIFAVVGFLGAGYSFIISAISINKGPKCLMANSTWGYPFHDGDYLNDEALWNKCREPLNVVPWNLTLFSILLVVGGIQMVLCAIQVVNGLLGTLCGDCQCCGCCGGDGPV

SEQ ID NO: 4559 - protein, 243 aa, Homo sapiens [sequence omitted]

SEQ ID NO: 4560 - protein, 278 aa, Homo sapiens
MQPAAASERGGADADHVPLLGLLRLQLRAARQPGAMRPQGPAASPQRLRGLLLLLLLQLPAPSSASEIPKGKQKAQLRQREVVDLYNGMCLQGPAGVPGRDGSPGANVIPGTPGIPGRDGFKGEKGECLRESFEESWTPNYKQCSWSSLNYGIDLGKIAECTFTKMRSNSALRVLFSGSLRLKCRNACCQRWYFTFNGAECSGPLPIEAIIYLDQGSPEMNSTINIHRTSSVEGLCEGIGAGLVDVAIWVGTCSDYPKGDASTGWNSVSRIIIEELPK

What is claimed:

1. An isolated polynucleotide comprising a sequence selected from the group consisting of:
(a) sequences provided in SEQ ID NOs:1-66, 75-152, 174-177, 182, 184-452, and 454-4550;
(b) complements of the sequences provided in SEQ ID NOs:1-66, 75-152, 174-177, 182, 184-452, and 454-4550;
(c) sequences consisting of at least 20 contiguous residues of a sequence provided in SEQ ID NOs:1-66, 75-152, 174-177, 182, 184-452, and 454-4550;
(d) sequences that hybridize to a sequence provided in SEQ ID NOs:1-66, 75-152, 174-177, 182, 184-452, and 454-4550, under moderately stringent conditions;
(e) sequences having at least 75% identity to a sequence of SEQ ID NOs:1-66, 75-152, 174-177, 182, 184-452, and 454-4550;
(f) sequences having at least 90% identity to a sequence of SEQ ID NOs:1-66, 75-152, 174-177, 182, 184-452, and 454-4550; and
(g) degenerate variants of a sequence provided in SEQ ID NOs:1-66, 75-152, 174-177, 182, 184-452, and 454-4550.

2. An isolated polypeptide comprising an amino acid sequence selected from the group consisting of:
(a) sequences encoded by a polynucleotide of claim 1;
(b) sequences having at least 70% identity to a sequence encoded by a polynucleotide of claim 1;
(c) sequences having at least 90% identity to a sequence encoded by a polynucleotide of claim 1; and
(d) a polypeptide sequence set forth in SEQ ID NOs: SEQ ID NOs:67-74, 153-173, 178-181, 183, 453, 4551-4554, 4558-4560;
(e) sequences having at least 70% identity to a polypeptide sequence set forth in SEQ ID NOs:67-74, 153-173, 178-181, 183, 453, 4551-4554, 4558-4560; and
(f) sequences having at least 90% identity to a polypeptide sequence set forth in SEQ ID NOs:67-74, 153-173, 178-181, 183, 453, 4551-4554, 4558-4560.

3. An expression vector comprising a polynucleotide of claim 1 operably linked to an expression control sequence.

4. A host cell transformed or transfected with an expression vector according to claim 3.

5. An isolated antibody, or antigen-binding fragment thereof, that specifically binds to a polypeptide of claim 2.

6. A method for detecting the presence of a cancer in a patient, comprising the steps of:
(a) obtaining a biological sample from the patient;
(b) contacting the biological sample with a binding agent that binds to a polypeptide of claim 2;
(c) detecting in the sample an amount of polypeptide that binds to the binding agent; and
(d) comparing the amount of polypeptide to a predetermined cut-off value and therefrom determining the presence of a cancer in the patient.

7. A fusion protein comprising at least one polypeptide according to claim 2.

8. An oligonucleotide that hybridizes to a sequence recited in SEQ ID NOs:1-66, 75-152, 174-177, 182, 184-452, and 454-4550 under moderately stringent conditions.

9. A method for stimulating and/or expanding T cells specific for a tumor protein, comprising contacting T cells with at least one component selected from the group consisting of:
(a) polypeptides according to claim 2;
(b) polynucleotides according to claim 1; and
(c) antigen-presenting cells that express a polypeptide according to claim 2,
under conditions and for a time sufficient to permit the stimulation and/or expansion of T cells.

10. An isolated T cell population, comprising T cells prepared according to the method of claim 9.

11. A composition comprising a first component selected from the group consisting of physiologically acceptable carriers and immunostimulants, and a second component selected from the group consisting of:
(a) polypeptides according to claim 2;
(b) polynucleotides according to claim 1;
(c) antibodies according to claim 5;
(d) fusion proteins according to claim 7;
(e) T cell populations according to claim 10; and
(f) antigen presenting cells that express a polypeptide according to claim 2.

12. A method for stimulating an immune response in a patient, comprising administering to the patient a composition of claim 11.

13. A method for the treatment of a pancreatic cancer in a patient, comprising administering to the patient a composition of claim 11.

14. A method for determining the presence of a cancer in a patient, comprising the steps of:
(a) obtaining a biological sample from the patient;
(b) contacting the biological sample with an oligonucleotide according to claim 8;
(c) detecting in the sample an amount of a polynucleotide that hybridizes to the oligonucleotide; and
(d) comparing the amount of polynucleotide that hybridizes to the oligonucleotide to a predetermined cut-off value, and therefrom determining the presence of the cancer in the patient.

15. A diagnostic kit comprising at least one oligonucleotide according to claim 8.

16. A diagnostic kit comprising at least one antibody according to claim 5 and a detection reagent, wherein the detection reagent comprises a reporter group.

17. A method for inhibiting the development of a cancer in a patient, comprising the steps of:
(a) incubating CD4+ and/or CD8+ T cells isolated from a patient with at least one component selected from the group consisting of: (i) polypeptides according to claim 2; (ii) polynucleotides according to claim 1; and (iii) antigen presenting cells that express a polypeptide of claim 2, such that T cell proliferate;
(b) administering to the patient an effective amount of the proliferated T cells,
and thereby inhibiting the development of a cancer in the patient.
